(19) United States
(12) Patent Application Publication
(10) Pub. No.: US 2005/0181464 A1
(43) Pub. Date: Aug. 18, 2005

(54) Novel purified polypeptides from bacteria

(75) Inventors: Aled Edwards, Toronto (CA); Akil Dharamsi, Richmond Hill (CA); Masoud Vedadi, Toronto (CA); Muhammad Zahoor Alam, Oshawa (CA); Cheryl Arrowsmith, Toronto (CA); Donald E. Awrey, Mississauga (CA); Bryan Beattie, Oakville (CA); Kristina Buzadzija, Mississauga (CA); Teresa Clarke, Toronto (CA); Megan Domagala, Woodstock (CA); Simon Houston, Toronto (CA); Dhushy Kanagarajah, Mississauga (CA); Qin Li, Toronto (CA); Kamran Mansoury, Toronto (CA); Merry-Lynn McDonald, Ajax (CA); Kathleen Nethery-Brokx, Toronto (CA); Ivy Ng, Toronto (CA); Hui Ouyang, Toronto (CA); Dawn Richards, Toronto (CA); Francois Vallee, Toronto (CA); Cristina Virag, Brampton (CA)

Correspondence Address: FOLEY HOAG, LLP;PATENT GROUP, WORLD TRADE CENTER WEST, 155 SEAPORT BLVD, BOSTON, MA, 02110, US

(73) Assignee: Affinium Pharmaceuticals, Inc., Toronto (CA)

(21) Appl. No.: 10/953,901

(22) Filed: Sep. 29, 2004

Related U.S. Application Data
(63) Continuation-in-part of application No. PCT/CA03/00465, filed on Apr. 4, 2003.
(63) Continuation-in-part of application No. PCT/CA03/00483, filed on Apr. 8, 2003.
(63) Continuation-in-part of application No. PCT/CA03/00482, filed on Apr. 8, 2003.
(63) Continuation-in-part of application No. PCT/CA03/00786, filed on Jun. 2, 2003.
(60) Provisional application No. 60/370,060, filed on Apr. 4, 2002.
(60) Provisional application No. 60/369,831, filed on Apr. 4, 2002.
(60) Provisional application No. 60/369,819, filed on Apr. 4, 2002.
(60) Provisional application No. 60/369,826, filed on Apr. 4, 2002.
(60) Provisional application No. 60/370,852, filed on Apr. 8, 2002.
(60) Provisional application No. 60/370,681, filed on Apr. 8, 2002.
(60) Provisional application No. 60/371,014, filed on Apr. 9, 2002.
(60) Provisional application No. 60/371,180, filed on Apr. 9, 2002.
(60) Provisional application No. 60/371,008, filed on Apr. 9, 2002.
(60) Provisional application No. 60/371,114, filed on Apr. 9, 2002.
(60) Provisional application No. 60/371,189, filed on Apr. 9, 2002.
(60) Provisional application No. 60/371,064, filed on Apr. 9, 2002.
(60) Provisional application No. 60/370,806, filed on Apr. 8, 2002.
(60) Provisional application No. 60/370,978, filed on Apr. 9, 2002.
(60) Provisional application No. 60/371,009, filed on Apr. 9, 2002.
(60) Provisional application No. 60/370,868, filed on Apr. 8, 2002.
(60) Provisional application No. 60/371,025, filed on Apr. 9, 2002.
(60) Provisional application No. 60/371,094, filed on Apr. 9, 2002.
(60) Provisional application No. 60/370,959, filed on Apr. 9, 2002.
(60) Provisional application No. 60/371,065, filed on Apr. 9, 2002.
(60) Provisional application No. 60/384,634, filed on May 31, 2002.
(60) Provisional application No. 60/385,157, filed on May 31, 2002.
(60) Provisional application No. 60/385,611, filed on Jun. 4, 2002.
(60) Provisional application No. 60/385,747, filed on Jun. 4, 2002.
(60) Provisional application No. 60/385,752, filed on Jun. 4, 2002.
(60) Provisional application No. 60/385,780, filed on Jun. 4, 2002.
(60) Provisional application No. 60/385,797, filed on Jun. 4, 2002.
(60) Provisional application No. 60/385,785, filed on Jun. 4, 2002.
(60) Provisional application No. 60/385,542, filed on Jun. 4, 2002.
(60) Provisional application No. 60/385,773, filed on Jun. 4, 2002.
(60) Provisional application No. 60/386,024, filed on Jun. 5, 2002.
(60) Provisional application No. 60/386,350, filed on Jun. 5, 2002.
(60) Provisional application No. 60/385,962, filed on Jun. 5, 2002.
(60) Provisional application No. 60/386,141, filed on Jun. 5, 2002.
(60) Provisional application No. 60/386,586, filed on Jun. 5, 2002.
(60) Provisional application No. 60/385,750, filed on Jun. 4, 2002.
(60) Provisional application No. 60/386,022, filed on Jun. 5, 2002.
(60) Provisional application No. 60/386,087, filed on Jun. 5, 2002.
(60) Provisional application No. 60/386,573, filed on Jun. 6, 2002.
(60) Provisional application No. 60/386,834, filed on Jun. 6, 2002.
(60) Provisional application No. 60/386,368, filed on Jun. 6, 2002.
(60) Provisional application No. 60/386,441, filed on Jun. 6, 2002.
(60) Provisional application No. 60/386,528, filed on Jun. 6, 2002.
(60) Provisional application No. 60/386,369, filed on Jun. 6, 2002.
(60) Provisional application No. 60/386,436, filed on Jun. 6, 2002.
(60) Provisional application No. 60/399,970, filed on Jul. 31, 2002.
(60) Provisional application No. 60/399,861, filed on Jul. 31, 2002.
(60) Provisional application No. 60/399,984, filed on Jul. 31, 2002.
(60) Provisional application No. 60/399,969, filed on Jul. 31, 2002.
(60) Provisional application No. 60/399,983, filed on Jul. 31, 2002.
(60) Provisional application No. 60/399,839, filed on Jul. 31, 2002.
(60) Provisional application No. 60/399,985, filed on Jul. 31, 2002.
(60) Provisional application No. 60/400,380, filed on Aug. 1, 2002.
(60) Provisional application No. 60/400,230, filed on Aug. 1, 2002.
(60) Provisional application No. 60/400,363, filed on Aug. 1, 2002.
(60) Provisional application No. 60/400,436, filed on Aug. 1, 2002.
(60) Provisional application No. 60/400,268, filed on Aug. 1, 2002.
(60) Provisional application No. 60/400,442, filed on Aug. 1, 2002.
(60) Provisional application No. 60/400,154, filed on Aug. 1, 2002.
(60) Provisional application No. 60/400,463, filed on Aug. 1, 2002.
(60) Provisional application No. 60/400,434, filed on Aug. 1, 2002.
(60) Provisional application No. 60/400,433, filed on Aug. 1, 2002.
(60) Provisional application No. 60/400,374, filed on Aug. 1, 2002.
(60) Provisional application No. 60/400,365, filed on Aug. 1, 2002.

(51) Int. Cl. G01N 33/554; G01N 33/569; G01N 33/00; C07K 14/195

(52) U.S. Cl. 435/7.32; 436/86; 530/350

(57) ABSTRACT

The present invention relates to polypeptide targets for pathogenic bacteria. The invention also provides biochemical and biophysical characteristics of those polypeptides.

### RELATED APPLICATION INFORMATION

[0001] This application is:

[0002] (1) a continuation-in-part of International Application No. PCT/CA03//00465, filed Apr. 4, 2003, which claims the benefit of priority to the following U.S. Provisional Patent Applications:

| Provisional | |
|---|---|
| Application Number | Filing Date |
| 60/370,060 | Apr. 4, 2002 |
| 60/369,831 | Apr. 4, 2002 |
| 60/369,819 | Apr. 4, 2002 |
| 60/369,826 | Apr. 4, 2002 |
| 60/370,852 | Apr. 8, 2002 |
| 60/370,681 | Apr. 8, 2002 |
| 60/371,014 | Apr. 9, 2002 |
| 60/371,180 | Apr. 9, 2002 |
| 60/371,008 | Apr. 9, 2002 |
| 60/371,114 | Apr. 9, 2002 |
| 60/371,189 | Apr. 9, 2002 |
| 60/371,064 | Apr. 9, 2002 |

[0003] (2) a continuation-in-part of International Application No. PCT/CA03//00483, filed Apr. 8, 2003, which claims the benefit of priority to the following U.S. Provisional Patent Applications:

| Provisional | |
|---|---|
| Application Number | Filing Date |
| 60/370,806 | Apr. 8, 2002 |
| 60/370,978 | Apr. 9, 2002 |
| 60/371,009 | Apr. 9, 2002 |

[0004] (3) a continuation-in-part of International Application No. PCT/CA03//00482, filed Apr. 8, 2003, which claims the benefit of priority to the following U.S. Provisional Patent Applications:

| Provisional | |
|---|---|
| Application Number | Filing Date |
| 60/370,868 | Apr. 8, 2002 |
| 60/371,025 | Apr. 9, 2002 |
| 60/371,094 | Apr. 9, 2002 |
| 60/370,959 | Apr. 9, 2002 |
| 60/371,065 | Apr. 9, 2002 |

[0005] and (4) a continuation-in-part of International Application No. PCT/CA03//00786, filed Jun. 2, 2003, which claims the benefit of priority to the following U.S. Provisional Patent Applications:

| Provisional | Attorney | |
|---|---|---|
| Application Number | Docket Number | Filing Date |
| 60/384,634 | IPT-263.60 | May 31, 2002 |
| 60/385,157 | IPT-268.60 | May 31, 2002 |
| 60/385,611 | IPT-284.60 | Jun. 4, 2002 |
| 60/385,747 | IPT-292.60 | Jun. 4, 2002 |
| 60/385,752 | IPT-298.60 | Jun. 4, 2002 |
| 60/385,780 | IPT-290.60 | Jun. 4, 2002 |
| 60/385,797 | IPT-297.60 | Jun. 4, 2002 |
| 60/385,785 | IPT-270.60 | Jun. 4, 2002 |
| 60/385,542 | IPT-277.60 | Jun. 4, 2002 |
| 60/385,773 | IPT-293.60 | Jun. 4, 2002 |
| 60/386,024 | IPT-285.60 | Jun. 5, 2002 |
| 60/386,350 | IPT-291.60 | Jun. 5, 2002 |
| 60/385,962 | IPT-267.60 | Jun. 5, 2002 |
| 60/386,141 | IPT-294.60 | Jun. 5, 2002 |
| 60/386,586 | IPT-269.60 | Jun. 5, 2002 |
| 60/385,750 | IPT-289.60 | Jun. 4, 2002 |
| 60/386,022 | IPT-299.60 | Jun. 5, 2002 |
| 60/386,087 | IPT-274.60 | Jun. 5, 2002 |
| 60/386,573 | IPT-275.60 | Jun. 6, 2002 |
| 60/386,834 | IPT-283.60 | Jun. 6, 2002 |
| 60/386,368 | IPT-278.60 | Jun. 6, 2002 |
| 60/386,441 | IPT-279.60 | Jun. 6, 2002 |
| 60/386,528 | IPT-272.60 | Jun. 6, 2002 |
| 60/386,369 | IPT-282.60 | Jun. 6, 2002 |
| 60/386,436 | IPT-302.60 | Jun. 6, 2002 |
| 60/399,970 | IPT-310.60 | Jul. 31, 2002 |
| 60/399,861 | IPT-312.60 | Jul. 31, 2002 |
| 60/399,984 | IPT-326.60 | Jul. 31, 2002 |
| 60/399,969 | IPT-308.60 | Jul. 31, 2002 |
| 60/399,983 | IPT-305.60 | Jul. 31, 2002 |
| 60/399,839 | IPT-317.60 | Jul. 31, 2002 |
| 60/399,985 | IPT-325.60 | Jul. 31, 2002 |
| 60/400,380 | IPT-320.60 | Aug. 1, 2002 |
| 60/400,230 | IPT-313.60 | Aug. 1, 2002 |
| 60/400,363 | IPT-321.60 | Aug. 1, 2002 |
| 60/400,436 | IPT-314.60 | Aug. 1, 2002 |
| 60/400,268 | IPT-311.60 | Aug. 1, 2002 |
| 60/400,442 | IPT-316.60 | Aug. 1, 2002 |
| 60/400,154 | IPT-327.60 | Aug. 1, 2002 |
| 60/400,463 | IPT-323.60 | Aug. 1, 2002 |
| 60/400,434 | IPT-322.60 | Aug. 1, 2002 |
| 60/400,433 | IPT-324.60 | Aug. 1, 2002 |
| 60/400,374 | IPT-315.60 | Aug. 1, 2002 |
| 60/400,365 | IPT-319.60 | Aug. 1, 2002 |

[0006] All of the foregoing patent applications are hereby incorporated by this reference in their entirety.

### INTRODUCTION

[0007] The discovery of novel antimicrobial agents that work by novel mechanisms is a problem researchers in all fields of drug development face today. The increasing prevalence of drug-resistant pathogens (bacteria, fungi, parasites, etc.) has led to significantly higher mortality rates from infectious diseases and currently presents a serious crisis worldwide. Despite the introduction of second and third generation antimicrobial drugs, certain pathogens have developed resistance to all currently available drugs.

[0008] One of the problems contributing to the development of multiple drug resistant pathogens is the limited number of protein targets for antimicrobial drugs. Many of the antibiotics currently in, use are structurally related or act through common targets or pathways. Accordingly, adaptive mutation of a single gene may render a pathogenic species resistant to multiple classes of antimicrobial drugs. Therefore, the rapid discovery of drug targets is urgently needed in order to combat the constantly evolving threat by such infectious microorganisms.

[0009] Recent advances in bacterial and viral genomics research provides an opportunity for rapid progress in the identification of drug targets. The complete genomic sequences for a number of microorganisms are available. However, knowledge of the complete genomic sequence is only the first step in a long process toward discovery of a viable drug target. The genomic sequence must be annotated to identify open reading frames (ORFs), the essentiality of the protein encoded by the ORF must be determined and the mechanism of action of the gene product must be determined in order to develop a targeted approach to drug discovery.

[0010] There are a variety of computer programs available to annotate genomic sequences. Genome annotation involves both identification of genes as well assignment of function thereto based on sequence comparison to homologous proteins with known or predicted functions. However, genome annotation has turned out to be much more of an art than a science. Factors such as splice variants and sequencing errors coupled with the particular algorithms and databases used to annotate the genome can result in significantly different annotations for the same genome. For example, upon reanalysis of the genome of Mycoplasma pneumoniae using more rigorous sequence comparisons coupled with molecular biological techniques, such as gel electrophoresis and mass spectrometry, researchers were able to identify several previously unidentified coding sequences, to dismiss a previous identified coding sequence as a likely pseudogene, and to adjust the length of several previously defined ORFs (Dandkar et al. (2000) Nucl. Acids Res. 28(17): 3278-3288). Furthermore, while overall conservation between amino acid sequences generally indicates a conservation of structure and function, specific changes at key residues can lead to significant variation in the biochemical and biophysical properties of a protein. In a comparison of three different functional annotations of the Mycoplasma genitalium genome, it was discovered that some genes were assigned three different functions and it was estimated that the overall error rate in the annotations was at least 8% (Brenner (1999) Trends Genet 15(4): 132-3). Accordingly, molecular biological techniques are required to ensure proper genome annotation and identify valid drug targets.

[0011] However, confirmation of genome annotation using molecular biological techniques is not an easy proposition due to the unpredictability in expression and purification of polypeptide sequences. Further, in order to carry out structural studies to validate proteins as potential drug targets, it is generally necessary to modify the native proteins in order to facilitate these analyses, e.g., by labeling the protein (e.g., with a heavy atom, isotopic label, polypeptide tag, etc.) or by creating fragments of the polypeptide corresponding to functional domains of a multi-domain protein. Moreover, it is well-known that even small changes in the amino acid sequence of a protein may lead to dramatic affects on protein solubility (Eberstadt et al. (1998) Nature 392: 941-945). Accordingly, genome-wide validation of protein targets will require considerable effort even in light of the sequence of the entire genome of an organism and/or purification conditions for homologs of a particular target.

[0012] We have developed reliable, high throughput methods to address some of the shortcomings identified above. In part, using these methods, we have now identified, expressed, and purified a number of antimicrobial targets from S. aureus, H. pylori, E. coli, S. pneumoniae, E. faecalis and P. aeruginosa. Various biophysical, bioinformatic and biochemical studies have been used to characterize the polypeptides of the invention.

TABLE OF CONTENTS

| RELATED APPLICATION INFORMATION | | | | | 1 |
|---|---|---|---|---|---|
| INTRODUCTION | | | | | 3 |
| TABLE OF CONTENTS | | | | | 5 |
| SUMMARY OF THE INVENTION | | | | | 6 |
| BRIEF DESCRIPTION OF THE FIGURES | | | | | 11 |
| DETAILED DESCRIPTION OF THE INVENTION | | | | | 55 |
| | 1. Definitions | | | | 55 |
| | 2. Polypeptides of the Invention | | | | 74 |
| | 3. Nucleic Acids of the Invention | | | | 115 |
| | 4. Homology Searching of Nucleotide and | | | | 124 |
| | Polypeptide Sequences | | | | |
| | 5. Analysis of Protein Properties | | | | 125 |
| | | (a) Analysis of Proteins by Mass Spectrometry | | | 125 |
| | | (b) Analysis of Proteins by Nuclear Magnetic | | | 127 |
| | | Resonance (NMR) | | | |
| | | (c) Analysis of Proteins by X-ray | | | 134 |
| | | Crystallography | | | |
| | 6. Interacting Proteins | | | | 150 |
| | 7. Antibodies | | | | 163 |
| | 8. Diagnostic Assays | | | | 166 |
| | 9. Drug Discovery | | | | 170 |
| | | (a) Drug Design | | | 170 |
| | | (b) In Vitro Assays | | | 179 |
| | | (c) In Vivo Assays | | | 181 |
| | 10. Vaccines | | | | 183 |
| | 11. Array Analysis | | | | 185 |
| | 12. Pharmaceutical Compositions | | | | 188 |
| | 13. Antimicrobial Agents | | | | 189 |
| | 14. Other Embodiments | | | | 190 |
| EXEMPLIFICATION | | | | | 194 |
| | | | EXAMPLE 1 | Isolation and Cloning | 194 |
| | | | | of Nucleic Acid | |
| | | | EXAMPLE 2 | Test Protein Expression | 198 |
| | | | | and Solubility | |
| | | | EXAMPLE 3 | Native Protein Expression | 199 |
| | | | EXAMPLE 4 | Expression of Selmet | 200 |
| | | | | Labeled Polypeptides | |
| | | | EXAMPLE 5 | Expression of ¹⁵N | 201 |
| | | | | Labeled Polypeptides | |
| | | | EXAMPLE 6 | Method One for Purifying | 202 |
| | | | | Polypeptides of the Invention | |
| | | | EXAMPLE 7 | Method Two for Purifying | 204 |
| | | | | Polypeptides of the Invention | |
| | | | EXAMPLE 8 | Method Three for Purifying | 204 |
| | | | | Polypeptides of the Invention | |
| | | | EXAMPLE 9 | Mass Spectrometry Analysis | 206 |
| | | | | via Fingerprint Mapping | |
| | | | EXAMPLE 10 | Mass Spectrometry Analysis | 208 |
| | | | | via High Mass | |
| | | | EXAMPLE 11 | Method One for Isolating and | 208 |
| | | | | Identifying Interacting Proteins | |
| | | | EXAMPLE 12 | Method Two for Isolating and | 213 |
| | | | | Identifying Interacting Proteins | |
| | | | EXAMPLE 13 | Sample for Mass Spectrometry | 214 |
| | | | | of Interacting Proteins | |
| | | | EXAMPLE 14 | Mass Spectrometric Analysis | 215 |
| | | | | of Interacting Proteins | |
| | | | EXAMPLE 15 | NMR Analysis | 217 |
| | | | EXAMPLE 16 | X-ray Crystallography | 217 |
| | | | EXAMPLE 17 | Annotations | 222 |
| | | | EXAMPLE 18 | Essential Gene Analysis | 223 |
| | | | EXAMPLE 19 | PDB Analysis | 224 |
| | | | EXAMPLE 20 | Virtual Genome Analysis | 224 |
| | | | EXAMPLE 21 | Epitopic Regions | 225 |

| | |
|---|---|
| EQUIVALENTS | 226 |
| We Claim: | 234 |

### SUMMARY OF THE INVENTION

[0013] As part of an effort at genome-wide structural and functional characterization of microbial targets, the present invention provides polypeptides from S. aureus, H. pylori, E. coli, S. pneumoniae, E. faecalis and P. aeruginosa. In various aspects, the invention provides the nucleic acid and amino acid sequences of polypeptides of the invention. The invention also provides purified, soluble forms of polypeptides of the invention suitable for structural and functional characterization using a variety of techniques, including, for example, affinity chromatography, mass spectrometry, NMR and x-ray crystallography. The invention further provides modified versions of the polypeptides of the invention to facilitate characterization, including polypeptides labeled with isotopic or heavy atoms and fusion proteins. One or more crystallized forms of the polypeptides of the invention may also be provided.

[0014] In general, polypeptides of the invention are expected to be involved in bacterial viability Because of the critical role that polypeptides with such functionality play in the life cycle and viability of their pathogenic species of origin, the polypeptides of the invention are, among other things, valuable drug targets. The biological activities for certain of the polypeptides of the invention are indicated in the following table, as described in further detail below.

| | Bacterial | | Gene |
|---|---|---|---|
| SEQ ID NOS | Species | Protein Annotation | Designation |
| SEQ ID NO: 5 | S. aureus | lysyl-tRNA synthetase | lysS |
| SEQ ID NO: 7 | | | |
| SEQ ID NO: 14 | S. pneumoniae | valine tRNA | valS |
| SEQ ID NO: 16 | | synthetase | |
| SEQ ID NO: 23 | S. pneumoniae | aspartate tRNA | aspS |
| SEQ ID NO: 25 | | synthetase | |
| SEQ ID NO: 32 | H. pylori | cysteine tRNA | cysS |
| SEQ ID NO: 34 | | synthetase | |
| SEQ ID NO: 41 | P. aeruginosa | malonyl-CoA-[acyl- | fabD |
| SEQ ID NO: 43 | | carrier-protein] | |
| | | transacylase | |
| SEQ ID NO: 50 | H. pylori | glutamate tRNA | gltX |
| SEQ ID NO: 52 | | synthetase, catalytic | |
| | | subunit | |
| SEQ ID NO: 59 | P. aeruginosa | protein chain initiation | infA |
| SEQ ID NO: 61 | | factor IF-1 | |
| SEQ ID NO: 68 | S. pneumoniae | translation initiation | infC |
| SEQ ID NO: 70 | | factor IF-3 | |
| SEQ ID NO: 77 | S. pneumoniae | threonine tRNA | thrS |
| SEQ ID NO: 79 | | synthetase | |
| SEQ ID NO: 86 | H. pylori | conserved hypothetical | yaeS |
| SEQ ID NO: 88 | | protein | |
| SEQ ID NO: 95 | E. coli | cysteine tRNA | cysS |
| SEQ ID NO: 97 | | synthetase | |
| SEQ ID NO: 104 | H. pylori | DNA polymerase III, | dnaN |
| SEQ ID NO: 106 | | beta-subunit | |
| SEQ ID NO: 113 | S. pneumoniae | 3-oxoacyl-[acyl- | fabF |
| SEQ ID NO: 115 | | carrier-protein] | |
| | | synthase II | |
| SEQ ID NO: 122 | H. pylori | methionine | map |
| SEQ ID NO: 124 | | aminopeptidase | |
| SEQ ID NO: 131 | S. pneumoniae | pyruvate kinase | pykA |
| SEQ ID NO: 133 | | | |
| SEQ ID NO: 140 | H. pylori | threonine tRNA | thrS |
| SEQ ID NO: 142 | | synthetase | |
| SEQ ID NO: 149 | P. aeruginosa | putative ATP-binding | ycfV |
| SEQ ID NO: 151 | | component of a | |
| | | transport system | |
| SEQ ID NO: 158 | S. pneumoniae | glucose-6-phosphate | zwf |
| SEQ ID NO: 160 | | dehydrogenase | |
| SEQ ID NO: 167 | S. pneumoniae | alanyl-tRNA | alaS |
| SEQ ID NO: 169 | | synthetase | |
| SEQ ID NO: 176 | S. pneumoniae | glutamate tRNA | gltX |
| SEQ ID NO: 178 | | synthetase, catalytic | |
| | | subunit | |
| SEQ ID NO: 185 | S. pneumoniae | isoleucine tRNA | ileS |
| SEQ ID NO: 187 | | synthetase | |
| SEQ ID NO: 194 | S. pneumoniae | RNA polymerase beta- | rpoC |
| SEQ ID NO: 196 | | prime chain | |
| SEQ ID NO: 203 | S. pneumoniae | RNA polymerase | rpoD |
| SEQ ID NO: 205 | | sigma-70 factor | |
| SEQ ID NO: 212 | S. pneumoniae | transketolase 1 | tktA |
| SEQ ID NO: 214 | | isozyme | |
| SEQ ID NO: 221 | P. aeruginosa | tryptophan tRNA | trpS |
| SEQ ID NO: 223 | | synthetase | |
| SEQ ID NO: 230 | E. faecalis | holo-(acyl-carrier | acpS |
| SEQ ID NO: 232 | | protein) synthase | |
| SEQ ID NO: 239 | E. faecalis | glutamate racemase | murI |
| SEQ ID NO: 241 | | | |
| SEQ ID NO: 248 | S. pneumoniae | glutamate racemase | murI |
| SEQ ID NO: 250 | | | |
| SEQ ID NO: 257 | E. faecalis | ribonuceloside | nrdE |
| SEQ ID NO: 259 | | diphosphate reductase | |
| | | alpha subunit | |
| SEQ ID NO: 266 | E. faecalis | gamma-glutamyl | proA |
| SEQ ID NO: 268 | | phosphate reductase | |
| SEQ ID NO: 275 | E. faecalis | triosephosphate | tpiA |
| SEQ ID NO: 277 | | isomerase | |
| SEQ ID NO: 284 | S. pneumoniae | triosephosphate | tpiA |
| SEQ ID NO: 286 | | isomerase | |
| SEQ ID NO: 293 | P. aeruginosa | branched-chain alpha- | bkdB |
| SEQ ID NO: 295 | | keto acid | |
| | | dehydrogenase | |
| SEQ ID NO: 302 | E. faecalis | tetrahydrodipicolinate | dapD |
| SEQ ID NO: 304 | | (THDP) N- | |
| | | succinyltransferase | |
| SEQ ID NO: 311 | P. aeruginosa | elongation factor P | efp |
| SEQ ID NO: 313 | | (EF-P) | |
| SEQ ID NO: 320 | E. faecalis | fructose-bisphosphate | fbaA |
| SEQ ID NO: 322 | | aldolase | |
| SEQ ID NO: 329 | E. faecalis | isopentenyl | fni |
| SEQ ID NO: 331 | | diphosphate isomerase | |
| SEQ ID NO: 338 | E. faecalis | glutamate | gdhA |
| SEQ ID NO: 340 | | dehydrogenase | |
| SEQ ID NO: 347 | S. pneumoniae | GroEL protein | groEL |
| SEQ ID NO: 349 | | | |
| SEQ ID NO: 356 | S. aureus | ATP-binding | modF |
| SEQ ID NO: 358 | | component of | |
| | | molybdate transport | |
| | | system | |
| SEQ ID NO: 365 | P. aeruginosa | DNA topoisomerase | parC |
| SEQ ID NO: 367 | | IV subunit A | |
| SEQ ID NO: 374 | S. pneumoniae | GTP cyclohydrolase II | ribA |
| SEQ ID NO: 376 | | | |
| SEQ ID NO: 383 | E. faecalis | putative aspartate- | usg |
| SEQ ID NO: 385 | | semialdehyde | |
| | | dehydrogenase | |
| SEQ ID NO: 392 | H. pylori | elongation factor P | efp |
| SEQ ID NO: 394 | | (EF-P) | |
| SEQ ID NO: 401 | S. aureus | GroES protein | groES |
| SEQ ID NO: 403 | | | |
| SEQ ID NO: 410 | P. aeruginosa | GroES protein | groES |
| SEQ ID NO: 412 | | | |
| SEQ ID NO: 419 | H. pylori | GroES protein | groES |
| SEQ ID NO: 421 | | | |
| SEQ ID NO: 428 | E. coli | transcription | nusG |
| SEQ ID NO: 430 | | termination factor | |
| | | NusG | |
| SEQ ID NO: 437 | S. aureus | GrpE protein | grpE |
| SEQ ID NO: 439 | | | |
| SEQ ID NO: 446 | H. pylori | transcription | nusG |
| SEQ ID NO: 448 | | termination factor | |
| | | NusG | |
| SEQ ID NO: 455 | S. pneumoniae | transcription | nusG |
| SEQ ID NO: 457 | | termination factor | |
| | | NusG | |
| SEQ ID NO: 464 | H. pylori | DNA-directed RNA | rpoA |
| SEQ ID NO: 466 | | polymerase, alpha | |
| | | subunit | |
| SEQ ID NO: 473 | S. aureus | DNA-directed RNA | rpoA |
| SEQ ID NO: 475 | | polymerase, alpha | |
| | | subunit | |
| SEQ ID NO: 482 | H. pylori | prolyl-tRNA | proS |
| SEQ ID NO: 484 | | synthetase | |
| SEQ ID NO: 491 | S. pneumoniae | seryl-tRNA synthetase | serS |
| SEQ ID NO: 493 | | | |
| SEQ ID NO: 500 | P. aeruginosa | L-cysteine desulfurase | iscS |
| SEQ ID NO: 502 | | | |
| SEQ ID NO: 509 | E. coli | RhlR and LasR | sdiA |
| SEQ ID NO: 511 | | homologue | |
| SEQ ID NO: 518 | P. aeruginosa | autoinducer synthesis | rhlI |
| SEQ ID NO: 520 | | protein RhlI | |
| SEQ ID NO: 527 | P. aeruginosa | autoinducer synthesis | lasI |
| SEQ ID NO: 529 | | protein LasI | |
| SEQ ID NO: 536 | S. aureus | adenylate kinase | adk |
| SEQ ID NO: 538 | | | |
| SEQ ID NO: 545 | H. pylori | UDP-N- | glmU |
| SEQ ID NO: 547 | | acetylglucosamine | |
| | | pyrophosphorylase | |
| | | (glmU) | |
| SEQ ID NO: 554 | E. coli | geranyltranstransferase | ispA |
| SEQ ID NO: 556 | | (farnesyldiphosphate | |
| | | synthase) | |
| SEQ ID NO: 563 | H. pylori | enoyl-(acyl-carrier- | fabI |
| SEQ ID NO: 565 | | protein) reductase | |
| | | (NADH) | |
| SEQ ID NO: 572 | H. pylori | ribonucleoside | nrdB |
| SEQ ID NO: 574 | | diphosphate reductase, | |
| | | beta subunit | |

[0015] The SEQ ID NOS identified in the table above refer to the amino acid sequences for the indicated polypeptides, and such sequences are presented in full in the appended Figures. Other biological activities of polypeptides of the invention are described herein, or will be reasonably apparent to those skilled in the art in light of the present disclosure.

[0016] All of the information learned and described herein about the polypeptides of the invention may be used to design modulators of one or more of their biological activities. In particular, information critical to the design of therapeutic and diagnostic molecules, including, for example, the protein domain, druggable regions, structural information, and the like for polypeptides of the invention is now available or attainable as a result of the ability to prepare, purify and characterize them, and domains, fragments, variants and derivatives thereof.

[0017] In other aspects of the invention, structural and functional information about the polypeptides of the invention has and will be obtained. Such information, for example, may be incorporated into databases containing information on the polypeptides of the invention, as well as other polypeptide targets from other microbial species. Such databases will provide investigators with a powerful tool to analyze the polypeptides of the invention and aid in the rapid discovery and design of therapeutic and diagnostic molecules.

[0018] In another aspect, modulators, inhibitors, agonists or antagonists against the polypeptides of the invention, biological complexes containing them, or orthologues thereto, may be used to treat any disease or other treatable condition of a patient (including humans and animals). In particular, diseases caused by the following pathogenic species may be treated by any of such molecules:

| Bacterial Species | Diseases or Condition |
|---|---|
| S. aureus | a furuncle, chronic furunculosis, impetigo, acute |
| | osteomyelitis, pneumonia, endocarditis, scalded skin |
| | syndrome, toxic shock syndrome, and food poisoning |
| H. pylori | gastritis, adenocarcinoma and peptic ulcer disease |
| E. coli | urinary tract infection (e.g., cystitis or pyelonephritis), |
| | colitis, hemorrhagic colitis, diarrhea, and meningitis |
| | (particularly neonatal meningitis) |
| S. pneumoniae | pneumonia, meningitis, sinusitis, otitis media, |
| | endocarditis, arthritis, and peritonitis |
| P. aeruginosa | osteomyelitis, otitis externa, conjunctivitis, keratitis, |
| | endophthalmitis, alveolar necrosis, vascular invasion, |
| | bacteremia, and burn infection |
| E. faecalis | urinary tract infection, surgical wound infection, |
| | bacteremia, intra abdominal infection, pelvic infection, |
| | central nervous system infection, osteomyelitis, |
| | pulmonary infection, and endocarditis |

[0019] The present invention further allows relationships between polypeptides from the same and multiple species to be compared by isolating and studying the various polypeptides of the invention and other proteins. By such comparison studies, which may be multi-variable analysis as appropriate, it is possible to identify drugs that will affect multiple species or drugs that will affect one or a few species. In such a manner, so-called “wide spectrum” and “narrow spectrum” anti-infectives may be identified. Alternatively, drugs that are selective for one or more bacterial or other non-mammalian species, and not for one or more mammalian species (especially human), may be identified (and vice-versa).

[0020] In other embodiments, the invention contemplates kits including the subject nucleic acids, polypeptides, crystallized polypeptides, antibodies, and other subject materials, and optionally instructions for their use. Uses for such kits include, for example, diagnostic and therapeutic applications.

[0021] The embodiments and practices of the present invention, other embodiments, and their features and characteristics, will be apparent from the description, figures and claims that follow, with all of the claims hereby being incorporated by this reference into this Summary.

### BRIEF DESCRIPTION OF THE FIGURES

[0022] FIG. 1 shows the nucleic acid coding sequence (SEQ ID NO: 4) for lysyl-tRNA synthetase, with gene designation of lysS, as predicted from the genomic sequence of S. aureus. This predicted nucleic acid coding sequence was cloned and sequenced to produce the polynucleotide sequence shown in FIG. 3.

[0023] FIG. 2 shows the amino acid sequence (SEQ ID NO: 5) for lysyl-tRNA synthetase (lysS) from S. aureus, as predicted from the nucleotide sequence SEQ ID NO: 4 shown in FIG. 1.

[0024] FIG. 3 shows the experimentally determined nucleic acid coding sequence (SEQ ID NO: 6) for lysyl-tRNA synthetase (lysS) from S. aureus, as described in EXAMPLE 1.

[0025] FIG. 4 shows the amino acid sequence (SEQ ID NO: 7) for lysyl-tRNA synthetase (lysS) from S. aureus, as predicted from the experimentally determined nucleotide sequence SEQ ID NO: 6 shown in FIG. 3.

[0026] FIG. 5 shows the primer sequences used to amplify the nucleic acid of SEQ ID NO: 6. The primers are SEQ ID NO: 8 and SEQ ID NO: 9.

[0027] FIG. 6 contains TABLE 1, which provides among other things a variety of data and other information on lysyl-tRNA synthetase (lysS) from S. aureus.

[0028] FIG. 7 contains TABLE 2, which provides the results of several bioinformatic analyses relating to lysyl-tRNA synthetase (lysS) from S. aureus.

[0029] FIG. 8 depicts the results of tryptic peptide mass spectrum peak searching for lysyl-tRNA synthetase (lysS) from S. aureus, as described in EXAMPLE 9.

[0030] FIG. 9 shows the nucleic acid coding sequence (SEQ ID NO: 13) for valine tRNA synthetase, with gene designation of valS, as predicted from the genomic sequence of S. pneumoniae. This predicted nucleic acid coding sequence was cloned and sequenced to produce the polynucleotide sequence shown in FIG. 11.

[0031] FIG. 10 shows the amino acid sequence (SEQ ID NO: 14) for valine tRNA synthetase (valS) from S. pneumoniae, as predicted from the nucleotide sequence SEQ ID NO: 13 shown in FIG. 9.

[0032] FIG. 11 shows the experimentally determined nucleic acid coding sequence (SEQ ID NO: 15) for valine tRNA synthetase (valS) from S. pneumoniae, as described in EXAMPLE 1.

[0033] FIG. 12 shows the amino acid sequence (SEQ ID NO: 16) for valine tRNA synthetase (valS) from S. pneumoniae, as predicted from the experimentally determined nucleotide sequence SEQ ID NO: 15 shown in FIG. 11.

[0034] FIG. 13 shows the primer sequences used to amplify the nucleic acid of SEQ ID NO: 15. The primers are SEQ ID NO: 17 and SEQ ID NO: 18.

[0035] FIG. 14 contains TABLE 3, which provides among other things a variety of data and other information on valine tRNA synthetase (valS) from S. pneumoniae.

[0036] FIG. 15 contains TABLE 4, which provides the results of several bioinformatic analyses relating to valine tRNA synthetase (valS) from S. pneumoniae.

[0037] FIG. 16 shows the nucleic acid coding sequence (SEQ ID NO: 22) for aspartate tRNA synthetase, with gene designation of aspS, as predicted from the genomic sequence of S. pneumoniae. This predicted nucleic acid coding sequence was cloned and sequenced to produce the polynucleotide sequence shown in FIG. 18.

[0038] FIG. 17 shows the amino acid sequence (SEQ ID NO: 23) for aspartate tRNA synthetase (aspS) from S. pneumoniae, as predicted from the nucleotide sequence SEQ ID NO: 22 shown in FIG. 16.

[0039] FIG. 18 shows the experimentally determined nucleic acid coding sequence (SEQ ID NO: 24) for aspartate tRNA synthetase (aspS) from S. pneumoniae, as described in EXAMPLE 1.

[0040] FIG. 19 shows the amino acid sequence (SEQ ID NO: 25) for aspartate tRNA synthetase (aspS) from S. pneumoniae, as predicted from the experimentally determined nucleotide sequence SEQ ID NO: 24 shown in FIG. 18.

[0041] FIG. 20 shows the primer sequences used to amplify the nucleic acid of SEQ ID NO: 24. The primers are SEQ ID NO: 26 and SEQ ID NO: 27.

[0042] FIG. 21 contains TABLE 5, which provides among other things a variety of data and other information on aspartate tRNA synthetase (aspS) from S. pneumoniae.

[0043] FIG. 22 contains TABLE 6, which provides the results of several bioinformatic analyses relating to aspartate tRNA synthetase (aspS) from S. pneumoniae.

[0044] FIG. 23 shows the nucleic acid coding sequence (SEQ ID NO: 31) for cysteine tRNA synthetase, with gene designation of cysS, as predicted from the genomic sequence of H. pylori. This predicted nucleic acid coding sequence was cloned and sequenced to produce the polynucleotide sequence shown in FIG. 25.

[0045] FIG. 24 shows the amino acid sequence (SEQ ID NO: 32) for cysteine tRNA synthetase (cysS) from H. pylori, as predicted from the nucleotide sequence SEQ ID NO: 31 shown in FIG. 23.

[0046] FIG. 25 shows the experimentally determined nucleic acid coding sequence (SEQ ID NO: 33) for cysteine tRNA synthetase (cysS) from H. pylori, as described in EXAMPLE 1.

[0047] FIG. 26 shows the amino acid sequence (SEQ ID NO: 34) for cysteine tRNA synthetase (cysS) from H. pylori, as predicted from the experimentally determined nucleotide sequence SEQ ID NO: 33 shown in FIG. 25.

[0048] FIG. 27 shows the primer sequences used to amplify the nucleic acid of SEQ ID NO: 33. The primers are SEQ ID NO: 35 and SEQ ID NO: 36.

[0049] FIG. 28 contains TABLE 7, which provides among other things a variety of data and other information on cysteine tRNA synthetase (cysS) from H. pylori.

[0050] FIG. 29 contains TABLE 8, which provides the results of several bioinformatic analyses relating to cysteine tRNA synthetase (cysS) from H. pylori.

[0051] FIG. 30 depicts the results of tryptic peptide mass spectrum peak searching for cysteine tRNA synthetase (cysS) from H. pylori, as described in EXAMPLE 9.

[0052] FIG. 31 shows the nucleic acid coding sequence (SEQ ID NO: 40) for malonyl-CoA-[acyl-carrier-protein]transacylase, with gene designation of fabD, as predicted from the genomic sequence of P. aeruginosa. This predicted nucleic acid coding sequence was cloned and sequenced to produce the polynucleotide sequence shown in FIG. 33.

[0053] FIG. 32 shows the amino acid sequence (SEQ ID NO: 41) for malonyl-CoA-[acyl-carrier-protein]transacylase (fabD) from P. aeruginosa, as predicted from the nucleotide sequence SEQ ID NO: 40 shown in FIG. 31.

[0054] FIG. 33 shows the experimentally determined nucleic acid coding sequence (SEQ ID NO: 42) for malonyl-CoA-[acyl-carrier-protein]transacylase (fabD) from P. aeruginosa, as described in EXAMPLE 1.

[0055] FIG. 34 shows the amino acid sequence (SEQ ID NO: 43) for malonyl-CoA-[acyl-carrier-protein]transacylase (fabD) from P. aeruginosa, as predicted from the experimentally determined nucleotide sequence SEQ ID NO: 42 shown in FIG. 33.

[0056] FIG. 35 shows the primer sequences used to amplify the nucleic acid of SEQ ID NO: 42. The primers are SEQ ID NO: 44 and SEQ ID NO: 45.

[0057] FIG. 36 contains TABLE 9, which provides among other things a variety of data and other information on malonyl-CoA-[acyl-carrier-protein]transacylase (fabD) from P. aeruginosa.

[0058] FIG. 37 contains TABLE 10, which provides the results of several bioinformatic analyses relating to malonyl-CoA-[acyl-carrier-protein]transacylase (fabD) from P. aeruginosa.

[0059] FIG. 38 depicts a ¹H, ¹⁵N Heteronuclear Single Quantum Coherence (HSQC) spectrum of malonyl-CoA-[acyl-carrier-protein]transacylase (fabD) from P. aeruginosa, as described in EXAMPLE 15 below. The X-axis shows a proton chemical shift, while the Y-axis shows the ¹⁵N chemical shift of the purified ¹⁵N labeled polypeptide.

[0060] FIG. 39 depicts the results of tryptic peptide mass spectrum peak searching for malonyl-CoA-[acyl-carrier-protein]transacylase (fabD) from P. aeruginosa, as described in EXAMPLE 9.

[0061] FIG. 40 depicts a MALDI-TOF mass spectrum of malonyl-CoA-[acyl-carrier-protein]transacylase (fabD) from P. aeruginosa, as described in EXAMPLE 10.

[0062] FIG. 41 shows the nucleic acid coding sequence (SEQ ID NO: 49) for glutamate tRNA synthetase, catalytic subunit, with gene designation of gltX, as predicted from the genomic sequence of H. pylori. This predicted nucleic acid coding sequence was cloned and sequenced to produce the polynucleotide sequence shown in FIG. 43.

[0063] FIG. 42 shows the amino acid sequence (SEQ ID NO: 50) for glutamate tRNA synthetase, catalytic subunit (gltX) from H. pylori, as predicted from the nucleotide sequence SEQ ID NO: 49 shown in FIG. 41.

[0064] FIG. 43 shows the experimentally determined nucleic acid coding sequence (SEQ ID NO: 51) for glutamate tRNA synthetase, catalytic subunit (gltx) from H. pylori, as described in EXAMPLE 1.

[0065] FIG. 44 shows the amino acid sequence (SEQ ID NO: 52) for glutamate tRNA synthetase, catalytic subunit (gltX) from H. pylori, as predicted from the experimentally determined nucleotide sequence SEQ ID NO: 51 shown in FIG. 43.

[0066] FIG. 45 shows the primer sequences used to amplify the nucleic acid of SEQ ID NO: 51. The primers are SEQ ID NO: 53 and SEQ ID NO: 54.

[0067] FIG. 46 contains TABLE 11, which provides among other things a variety of data and other information on glutamate tRNA synthetase, catalytic subunit (gltX) from H. pylori.

[0068] FIG. 47 contains TABLE 12, which provides the results of several bioinformatic analyses relating to glutamate tRNA synthetase, catalytic subunit (gltX) from H. pylori.

[0069] FIG. 48 depicts the results of tryptic peptide mass spectrum peak searching for glutamate tRNA synthetase, catalytic subunit (gltx) from H. pylori, as described in EXAMPLE 9.

[0070] FIG. 49 shows the nucleic acid coding sequence (SEQ ID NO: 58) for protein chain initiation factor IF-1, with gene designation of infA, as predicted from the genomic sequence of P. aeruginosa. This predicted nucleic acid coding sequence was cloned and sequenced to produce the polynucleotide sequence shown in FIG. 51.

[0071] FIG. 50 shows the amino acid sequence (SEQ ID NO: 59) for protein chain initiation factor IF-1 (infA) from P. aeruginosa, as predicted from the nucleotide sequence SEQ ID NO: 58 shown in FIG. 49.

[0072] FIG. 51 shows the experimentally determined nucleic acid coding sequence (SEQ ID NO: 60) for protein chain initiation factor IF-1 (infA) from P. aeruginosa, as described in EXAMPLE 1.

[0073] FIG. 52 shows the amino acid sequence (SEQ ID NO: 61) for protein chain initiation factor IF-1 (infA) from P. aeruginosa, as predicted from the experimentally determined nucleotide sequence SEQ ID NO: 60 shown in FIG. 51.

[0074] FIG. 53 shows the primer sequences used to amplify the nucleic acid of SEQ ID NO: 60. The primers are SEQ ID NO: 62 and SEQ ID NO: 63.

[0075] FIG. 54 contains TABLE 13, which provides among other things a variety of data and other information on protein chain initiation factor IF-1 (infA) from P. aeruginosa.

[0076] FIG. 55 contains TABLE 14, which provides the results of several bioinformatic analyses relating to protein chain initiation factor IF-1 (infA) from P. aeruginosa.

[0077] FIG. 56 depicts a ¹H, ¹⁵N Heteronuclear Single Quantum Coherence (HSQC) spectrum of protein chain initiation factor IF-1 (infA) from P. aeruginosa, as described in EXAMPLE 15 below. The X-axis shows a proton chemical shift, while the Y-axis shows the ¹⁵N chemical shift of the purified ¹⁵N labeled polypeptide.

[0078] FIG. 57 shows the nucleic acid coding sequence (SEQ ID NO: 67) for translation initiation factor IF-3, with gene designation of infC, as predicted from the genomic sequence of S. pneumoniae. This predicted nucleic acid coding sequence was cloned and sequenced to produce the polynucleotide sequence shown in FIG. 59.

[0079] FIG. 58 shows the amino acid sequence (SEQ ID NO: 68) for translation initiation factor IF-3 (infC) from S. pneumoniae, as predicted from the nucleotide sequence SEQ ID NO: 67 shown in FIG. 57.

[0080] FIG. 59 shows the experimentally determined nucleic acid coding sequence (SEQ ID NO: 69) for translation initiation factor IF-3 (infC) from S. pneumoniae, as described in EXAMPLE 1.

[0081] FIG. 60 shows the amino acid sequence (SEQ ID NO: 70) for translation initiation factor IF-3 (infC) from S. pneumoniae, as predicted from the experimentally determined nucleotide sequence SEQ ID NO: 69 shown in FIG. 59.

[0082] FIG. 61 shows the primer sequences used to amplify the nucleic acid of SEQ ID NO: 69. The primers are SEQ ID NO: 71 and SEQ ID NO: 72.

[0083] FIG. 62 contains TABLE 15, which provides among other things a variety of data and other information on translation initiation factor IF-3 (infC) from S. pneumoniae.

[0084] FIG. 63 contains TABLE 16, which provides the results of several bioinformatic analyses relating to translation initiation factor IF-3 (infC) from S. pneumoniae.

[0085] FIG. 64 depicts a ¹H, ¹⁵N Heteronuclear Single Quantum Coherence (HSQC) EXAMPLE 15 below. The X-axis shows a proton chemical shift, while the Y-axis shows the ¹⁵N chemical shift of the purified ¹⁵N labeled polypeptide.

[0086] FIG. 65 shows the nucleic acid coding sequence (SEQ ID NO: 76) for threonine tRNA synthetase, with gene designation of thrS, as predicted from the genomic sequence of S. pneumoniae. This predicted nucleic acid coding sequence was cloned and sequenced to produce the polynucleotide sequence shown in FIG. 67.

[0087] FIG. 66 shows the amino acid sequence (SEQ ID NO: 77) for threonine tRNA synthetase (thrS) from S. pneumoniae, as predicted from the nucleotide sequence SEQ ID NO: 76 shown in FIG. 65.

[0088] FIG. 67 shows the experimentally determined nucleic acid coding sequence (SEQ ID NO: 78) for threonine tRNA synthetase (thrS) from S. pneumoniae, as described in EXAMPLE 1.

[0089] FIG. 68 shows the amino acid sequence (SEQ ID NO: 79) for threonine tRNA synthetase (thrS) from S. pneumoniae, as predicted from the experimentally determined nucleotide sequence SEQ ID NO: 78 shown in FIG. 67.

[0090] FIG. 69 shows the primer sequences used to amplify the nucleic acid of SEQ ID NO: 78. The primers are SEQ ID NO: 80 and SEQ ID NO: 81.

[0091] FIG. 70 contains TABLE 17, which provides among other things a variety of data and other information on threonine tRNA synthetase (thrS) from S. pneumoniae.

[0092] FIG. 71 contains TABLE 18, which provides the results of several bioinformatic analyses relating to threonine tRNA synthetase (thrS) from S. pneumoniae.

[0093] FIG. 72 shows the nucleic acid coding sequence (SEQ ID NO: 85) for conserved hypothetical protein, with gene designation of yaeS, as predicted from the genomic sequence of H. pylori. This predicted nucleic acid coding sequence was cloned and sequenced to produce the polynucleotide sequence shown in FIG. 74.

[0094] FIG. 73 shows the amino acid sequence (SEQ ID NO: 86) for conserved hypothetical protein (yaeS) from H. pylori, as predicted from the nucleotide sequence SEQ ID NO: 85 shown in FIG. 72.

[0095] FIG. 74 shows the experimentally determined nucleic acid coding sequence (SEQ ID NO: 87) for conserved hypothetical protein (yaeS) from H. pylori, as described in EXAMPLE 1.

[0096] FIG. 75 shows the amino acid sequence (SEQ ID NO: 88) for conserved hypothetical protein (yaeS) from H. pylori, as predicted from the experimentally determined nucleotide sequence SEQ ID NO: 87 shown in FIG. 74.

[0097] FIG. 76 shows the primer sequences used to amplify the nucleic acid of SEQ ID NO: 87. The primers are SEQ ID NO: 89 and SEQ ID NO: 90.

[0098] FIG. 77 contains TABLE 19, which provides among other things a variety of data and other information on conserved hypothetical protein (yaeS) from H. pylori.

[0099] FIG. 78 contains TABLE 20, which provides the results of several bioinformatic analyses relating to conserved hypothetical protein (yaeS) from H. pylori.

[0100] FIG. 79 depicts the results of tryptic peptide mass spectrum peak searching for conserved hypothetical protein (yaeS) from H. pylori, as described in EXAMPLE 9.

[0101] FIG. 80 shows the nucleic acid coding sequence (SEQ ID NO: 94) for cysteine tRNA synthetase, with gene designation of cysS, as predicted from the genomic sequence of E. coli. This predicted nucleic acid coding sequence was cloned and sequenced to produce the polynucleotide sequence shown in FIG. 82.

[0102] FIG. 81 shows the amino acid sequence (SEQ ID NO: 95) for cysteine tRNA synthetase (cysS) from E. coli, as predicted from the nucleotide sequence SEQ ID NO: 94 shown in FIG. 80.

[0103] FIG. 82 shows the experimentally determined nucleic acid coding sequence (SEQ ID NO: 96) for cysteine tRNA synthetase (cysS) from E. coli, as described in EXAMPLE 1.

[0104] FIG. 83 shows the amino acid sequence (SEQ ID NO: 97) for cysteine tRNA synthetase (cysS) from E. coli, as predicted from the experimentally determined nucleotide sequence SEQ ID NO: 96 shown in FIG. 82.

[0105] FIG. 84 shows the primer sequences used to amplify the nucleic acid of SEQ ID NO: 96. The primers are SEQ ID NO: 98 and SEQ ID NO: 99.

[0106] FIG. 85 contains TABLE 21, which provides among other things a variety of data and other information on cysteine tRNA synthetase (cysS) from E. coli.

[0107] FIG. 86 contains TABLE 22, which provides the results of several bioinformatic analyses relating to cysteine tRNA synthetase (cysS) from E. coli.

[0108] FIG. 87 depicts the results of tryptic peptide mass spectrum peak searching for cysteine tRNA synthetase (cysS) from E. coli, as described in EXAMPLE 9.

[0109] FIG. 88 depicts a MALDI-TOF mass spectrum of cysteine tRNA synthetase (cysS) from E. coli, as described in EXAMPLE 10.

[0110] FIG. 89 shows the nucleic acid coding sequence (SEQ ID NO: 103) for DNA polymerase III, beta-subunit, with gene designation of dnaN, as predicted from the genomic sequence of H. pylori. This predicted nucleic acid coding sequence was cloned and sequenced to produce the polynucleotide sequence shown in FIG. 91.

[0111] FIG. 90 shows the amino acid sequence (SEQ ID NO: 104) for DNA polymerase III, beta-subunit (dnaN) from H. pylori, as predicted from the nucleotide sequence SEQ ID NO: 103 shown in FIG. 89.

[0112] FIG. 91 shows the experimentally determined nucleic acid coding sequence (SEQ ID NO: 105) for DNA polymerase III, beta-subunit (dnaN) from H. pylori, as described in EXAMPLE 1.

[0113] FIG. 92 shows the amino acid sequence (SEQ ID NO: 106) for DNA polymerase III, beta-subunit (dnaN) from H. pylori, as predicted from the experimentally determined nucleotide sequence SEQ ID NO: 105 shown in FIG. 91.

[0114] FIG. 93 shows the primer sequences used to amplify the nucleic acid of SEQ ID NO: 105. The primers are SEQ ID NO: 107 and SEQ ID NO: 108.

[0115] FIG. 94 contains TABLE 23, which provides among other things a variety of data and other information on DNA polymerase III, beta-subunit (dnaN) from H. pylori.

[0116] FIG. 95 contains TABLE 24, which provides the results of several bioinformatic analyses relating to DNA polymerase III, beta-subunit (dnaN) from H. pylori.

[0117] FIG. 96 depicts the results of tryptic peptide mass spectrum peak searching for DNA polymerase III, beta-subunit (dnaN) from H. pylori, as described in EXAMPLE 9.

[0118] FIG. 97 depicts a MALDI-TOF mass spectrum of DNA polymerase III, beta-subunit (dnaN) from H. pylori, as described in EXAMPLE 10.

[0119] FIG. 98 shows the nucleic acid coding sequence (SEQ ID NO: 112) for 3-oxoacyl-[acyl-carrier-protein]synthase II, with gene designation of fabF, as predicted from the genomic sequence of S. pneumoniae. This predicted nucleic acid coding sequence was cloned and sequenced to produce the polynucleotide sequence shown in FIG. 100;

[0120] FIG. 99 shows the amino acid sequence (SEQ ID NO: 113) for 3-oxoacyl-[acyl-carrier-protein]synthase II (fabF) from S. pneumoniae, as predicted from the nucleotide sequence SEQ ID NO: 112 shown in FIG. 98.

[0121] FIG. 100 shows the experimentally determined nucleic acid coding sequence (SEQ ID NO: 114) for 3-oxoacyl-[acyl-carrier-protein]synthase II (fabF) from S. pneumoniae, as described in EXAMPLE 1.

[0122] FIG. 101 shows the amino acid sequence (SEQ ID NO: 115) for 3-oxoacyl-[acyl-carrier-protein]synthase II (fabF) from S. pneumoniae, as predicted from the experimentally determined nucleotide sequence SEQ ID NO: 114 shown in FIG. 100.

[0123] FIG. 102 shows the primer sequences used to amplify the nucleic acid of SEQ ID NO: 114. The primers are SEQ ID NO: 116 and SEQ ID NO: 117.

[0124] FIG. 103 contains TABLE 25, which provides among other things a variety of data and other information on 3-oxoacyl-[acyl-carrier-protein]synthase II (fabF) from S. pneumoniae.

[0125] FIG. 104 contains TABLE 26, which provides the results of several bioinformatic analyses relating to 3-oxoacyl-[acyl-carrier-protein]synthase II (fabF) from S. pneumoniae.

[0126] FIG. 105 depicts a MALDI-TOF mass spectrum of 3-oxoacyl-[acyl-carrier-protein]synthase II (fabF) from S. pneumoniae, as described in EXAMPLE 10.

[0127] FIG. 106 shows the nucleic acid coding sequence (SEQ ID NO: 121) for methionine aminopeptidase, with gene designation of map, as predicted from the genomic sequence of H. pylori. This predicted nucleic acid coding sequence was cloned and sequenced to produce the polynucleotide sequence shown in FIG. 108.

[0128] FIG. 107 shows the amino acid sequence (SEQ ID NO: 122) for methionine aminopeptidase (map) from H. pylori, as predicted from the nucleotide sequence SEQ ID NO: 121 shown in FIG. 106.

[0129] FIG. 108 shows the experimentally determined nucleic acid coding sequence (SEQ ID NO: 123) for methionine aminopeptidase (map) from H. pylori, as described in EXAMPLE 1.

[0130] FIG. 109 shows the amino acid sequence (SEQ ID NO: 124) for methionine aminopeptidase (map) from H. pylori, as predicted from the experimentally determined nucleotide sequence SEQ ID NO: 123 shown in FIG. 108.

[0131] FIG. 110 shows the primer sequences used to amplify the nucleic acid of SEQ ID NO: 123. The primers are SEQ ID NO: 125 and SEQ ID NO: 126.

[0132] FIG. 111 contains TABLE 27, which provides among other things a variety of data and other information on methionine aminopeptidase (map) from H. pylori.

[0133] FIG. 112 contains TABLE 28, which provides the results of several bioinformatic analyses relating to methionine aminopeptidase (map) from H. pylori.

[0134] FIG. 113 depicts the results of tryptic peptide mass spectrum peak searching for methionine aminopeptidase (map) from H. pylori, as described in EXAMPLE 9.

[0135] FIG. 114 depicts a MALDI-TOF mass spectrum of methionine aminopeptidase (map) from H. pylori, as described in EXAMPLE 10.

[0136] FIG. 115 shows the nucleic acid coding sequence (SEQ ID NO: 130) for pyruvate kinase, with gene designation of pykA, as predicted from the genomic sequence of S. pneumoniae. This predicted nucleic acid coding sequence was cloned and sequenced to produce the polynucleotide sequence shown in FIG. 117.

[0137] FIG. 116 shows the amino acid sequence (SEQ ID NO: 131) for pyruvate kinase (pykA) from S. pneumoniae, as predicted from the nucleotide sequence SEQ ID NO: 130 shown in FIG. 115.

[0138] FIG. 117 shows the experimentally determined nucleic acid coding sequence (SEQ ID NO: 132) for pyruvate kinase (pykA) from S. pneumoniae, as described in EXAMPLE 1.

[0139] FIG. 118 shows the amino acid sequence (SEQ ID NO: 133) for pyruvate kinase (pykA) from S. pneumoniae, as predicted from the experimentally determined nucleotide sequence SEQ ID NO: 132 shown in FIG. 117.

[0140] FIG. 119 shows the primer sequences used to amplify the nucleic acid of SEQ ID NO: 132. The primers are SEQ ID NO: 134 and SEQ ID NO: 135.

[0141] FIG. 120 contains TABLE 29, which provides among other things a variety of data and other information on pyruvate kinase (pykA) from S. pneumoniae.

[0142] FIG. 121 contains TABLE 30, which provides the results of several bioinformatic analyses relating to pyruvate kinase (pykA) from S. pneumoniae.

[0143] FIG. 122 depicts a MALDI-TOF mass spectrum of pyruvate kinase (pykA) from S. pneumoniae, as described in EXAMPLE 10.

[0144] FIG. 123 shows the nucleic acid coding sequence (SEQ ID NO: 139) for threonine tRNA synthetase, with gene designation of thrS, as predicted from the genomic sequence of H. pylori. This predicted nucleic acid coding sequence was cloned and sequenced to produce the polynucleotide sequence shown in FIG. 125.

[0145] FIG. 124 shows the amino acid sequence (SEQ ID NO: 140) for threonine tRNA synthetase (thrS) from H. pylori, as predicted from the nucleotide sequence SEQ ID NO: 139 shown in FIG. 123.

[0146] FIG. 125 shows the experimentally determined nucleic acid coding sequence (SEQ ID NO: 141) for threonine tRNA synthetase (thrS) from H. pylori, as described in EXAMPLE 1.

[0147] FIG. 126 shows the amino acid sequence (SEQ ID NO: 142) for threonine tRNA synthetase (thrS) from H. pylori, as predicted from the experimentally determined nucleotide sequence SEQ ID NO: 141 shown in FIG. 125.

[0148] FIG. 127 shows the primer sequences used to amplify the nucleic acid of SEQ ID NO: 141. The primers are SEQ ID NO: 143 and SEQ ID NO: 144.

[0149] FIG. 128 contains TABLE 31, which provides among other things a variety of data and other information on threonine tRNA synthetase (thrS) from H. pylori.

[0150] FIG. 129 contains TABLE 32, which provides the results of several bioinformatic analyses relating to threonine tRNA synthetase (thrS) from H. pylori.

[0151] FIG. 130 depicts the results of tryptic peptide mass spectrum peak searching for threonine tRNA synthetase (thrS) from H. pylori, as described in EXAMPLE 9.

[0152] FIG. 131 shows the nucleic acid coding sequence (SEQ ID NO: 148) for putative ATP-binding component of a transport system, with gene designation of ycfV, as predicted from the genomic sequence of P. aeruginosa. This predicted nucleic acid coding sequence was cloned and sequenced to produce the polynucleotide sequence shown in FIG. 133.

[0153] FIG. 132 shows the amino acid sequence (SEQ ID NO: 149) for putative ATP-binding component of a transport system (ycfV) from P. aeruginosa, as predicted from the nucleotide sequence SEQ ID NO: 148 shown in FIG. 131.

[0154] FIG. 133 shows the experimentally determined nucleic acid coding sequence (SEQ ID NO: 150) for putative ATP-binding component of a transport system (ycfV) from P. aeruginosa, as described in EXAMPLE 1.

[0155] FIG. 134 shows the amino acid sequence (SEQ ID NO: 151) for putative ATP-binding component of a transport system (ycfV) from P. aeruginosa, as predicted from the experimentally determined nucleotide sequence SEQ ID NO: 150 shown in FIG. 133.

[0156] FIG. 135 shows the primer sequences used to amplify the nucleic acid of SEQ ID NO: 150. The primers are SEQ ID NO: 152 and SEQ ID NO: 153.

[0157] FIG. 136 contains TABLE 33, which provides among other things a variety of data and other information on putative ATP-binding component of a-transport system (ycfV) from P. aeruginosa.

[0158] FIG. 137 contains TABLE 34, which provides the results of several bioinformatic analyses relating to putative ATP-binding component of a transport system (ycfV) from P. aeruginosa.

[0159] FIG. 138 shows the nucleic acid coding sequence (SEQ ID NO: 157) for glucose-6-phosphate dehydrogenase, with gene designation of zwf, as predicted from the genomic sequence of S. pneumoniae. This predicted nucleic acid coding sequence was cloned and sequenced to produce the polynucleotide sequence shown in FIG. 140.

[0160] FIG. 139 shows the amino acid sequence (SEQ ID NO: 158) for glucose-6-phosphate dehydrogenase (zwf) from S. pneumoniae, as predicted from the nucleotide sequence SEQ ID NO: 157 shown in FIG. 138.

[0161] FIG. 140 shows the experimentally determined nucleic acid coding sequence (SEQ ID NO: 159) for glucose-6-phosphate dehydrogenase (zwf) from S. pneumoniae, as described in EXAMPLE 1.

[0162] FIG. 141 shows the amino acid sequence (SEQ ID NO: 160) for glucose-6-phosphate dehydrogenase (zwf) from S. pneumoniae, as predicted from the experimentally determined nucleotide sequence SEQ ID NO: 159 shown in FIG. 140.

[0163] FIG. 142 shows the primer sequences used to amplify the nucleic acid of SEQ ID NO: 159. The primers are SEQ ID NO: 161 and SEQ ID NO: 162.

[0164] FIG. 143 contains TABLE 35, which provides among other things a variety of data and other information on glucose-6-phosphate dehydrogenase (zwf) from S. pneumoniae.

[0165] FIG. 144 contains TABLE 36, which provides the results of several bioinformatic analyses relating to glucose-6-phosphate dehydrogenase (zwf) from S. pneumoniae.

[0166] FIG. 145 depicts a MALDI-TOF mass spectrum of glucose-6-phosphate dehydrogenase (zwf) from S. pneumoniae, as described in EXAMPLE 10.

[0167] FIG. 146 shows the nucleic acid coding sequence (SEQ ID NO: 166) for alanyl-tRNA synthetase, with gene designation of alas, as predicted from the genomic sequence of S. pneumoniae. This predicted nucleic acid coding sequence was cloned and sequenced to produce the polynucleotide sequence shown in FIG. 148.

[0168] FIG. 147 shows the amino acid sequence (SEQ ID NO: 167) for alanyl-tRNA synthetase (alas) from S. pneumoniae, as predicted from the nucleotide sequence SEQ ID NO: 166 shown in FIG. 146.

[0169] FIG. 148 shows the experimentally determined nucleic acid coding sequence (SEQ ID NO: 168) for alanyl-tRNA synthetase (alas) from S. pneumoniae, as described in EXAMPLE 1.

[0170] FIG. 149 shows the amino acid sequence (SEQ ID NO: 169) for alanyl-tRNA synthetase (alas) from S. pneumoniae, as predicted from the experimentally determined nucleotide sequence SEQ ID NO: 168 shown in FIG. 148.

[0171] FIG. 150 shows the primer sequences used to amplify the nucleic acid of SEQ ID NO: 168. The primers are SEQ ID NO: 170 and SEQ ID NO: 171.

[0172] FIG. 151 contains TABLE 37, which provides among other things a variety of data and other information on alanyl-tRNA synthetase (alas) from S. pneumoniae.

[0173] FIG. 152 contains TABLE 38, which provides the results of several bioinformatic analyses relating to alanyl-tRNA synthetase (alas) from S. pneumoniae.

[0174] FIG. 153 shows the nucleic acid coding sequence (SEQ ID NO: 175) for glutamate tRNA synthetase, catalytic subunit, with gene designation of gltX, as predicted from the genomic sequence of S. pneumoniae. This predicted nucleic acid coding sequence was cloned and sequenced to produce the polynucleotide sequence shown in FIG. 155.

[0175] FIG. 154 shows the amino acid sequence (SEQ ID NO: 176) for glutamate tRNA synthetase, catalytic subunit (gltX) from S. pneumoniae, as predicted from the nucleotide sequence SEQ ID NO: 175 shown in FIG. 153.

[0176] FIG. 155 shows the experimentally determined nucleic acid coding sequence (SEQ ID NO: 177) for glutamate tRNA synthetase, catalytic subunit (gltX) from S. pneumoniae, as described in EXAMPLE 1.

[0177] FIG. 156 shows the amino acid sequence (SEQ ID NO: 178) for glutamate tRNA synthetase, catalytic subunit (gltX) from S. pneumoniae, as predicted from the experimentally determined nucleotide sequence SEQ ID NO: 177 shown in FIG. 155.

[0178] FIG. 157 shows the primer sequences used to amplify the nucleic acid of SEQ ID NO: 177. The primers are SEQ ID NO: 179 and SEQ ID NO: 180.

[0179] FIG. 158 contains TABLE 39, which provides among other things a variety of data and other information on glutamate tRNA synthetase, catalytic subunit (gltX) from S. pneumoniae.

[0180] FIG. 159 contains TABLE 40, which provides the results of several bioinformatic analyses relating to glutamate tRNA synthetase, catalytic subunit (gltX) from S. pneumoniae.

[0181] FIG. 160 depicts a MALDI-TOF mass spectrum of glutamate tRNA synthetase, catalytic subunit (gltX) from S. pneumoniae, as described in EXAMPLE 10.

[0182] FIG. 161 shows the nucleic acid coding sequence (SEQ ID NO: 184) for isoleucine tRNA synthetase, with gene designation of ileS, as predicted from the genomic sequence of S. pneumoniae. This predicted nucleic acid coding sequence was cloned and sequenced to produce the polynucleotide sequence shown in FIG. 163.

[0183] FIG. 162 shows the amino acid sequence (SEQ ID NO: 185) for isoleucine tRNA synthetase (ileS) from S. pneumoniae, as predicted from the nucleotide sequence SEQ ID NO: 184 shown in FIG. 161.

[0184] FIG. 163 shows the experimentally determined nucleic acid coding sequence (SEQ ID NO: 186) for isoleucine tRNA synthetase (ileS) from S. pneumoniae, as described in EXAMPLE 1.

[0185] FIG. 164 shows the amino acid sequence (SEQ ID NO: 187) for isoleucine tRNA synthetase (ileS) from S. pneumoniae, as predicted from the experimentally determined nucleotide sequence SEQ ID NO: 186 shown in FIG. 163.

[0186] FIG. 165 shows the primer sequences used to amplify the nucleic acid of SEQ ID NO: 186. The primers are SEQ ID NO: 188 and SEQ ID NO: 189.

[0187] FIG. 166 contains TABLE 41, which provides among other things a variety of data and other information on isoleucine tRNA synthetase (ileS) from S. pneumoniae.

[0188] FIG. 167 contains TABLE 42, which provides the results of several bioinformatic analyses relating to isoleucine tRNA synthetase (ileS) from S. pneumoniae.

[0189] FIG. 168 depicts the results of tryptic peptide mass spectrum peak searching for isoleucine tRNA synthetase (ileS) from S. pneumoniae, as described in EXAMPLE 9.

[0190] FIG. 169 depicts a MALDI-TOF mass spectrum of isoleucine tRNA synthetase (ileS) from S. pneumoniae, as described in EXAMPLE 10.

[0191] FIG. 170 shows the nucleic acid coding sequence (SEQ ID NO: 193) for RNA polymerase beta-prime chain, with gene designation of rpoC, as predicted from the genomic sequence of S. pneumoniae. This predicted nucleic acid coding sequence was cloned and sequenced to produce the polynucleotide sequence shown in FIG. 172.

[0192] FIG. 171 shows the amino acid sequence (SEQ ID NO: 194) for RNA polymerase beta-prime chain (rpoC) from S. pneumoniae, as predicted from the nucleotide sequence SEQ ID NO: 193 shown in FIG. 170.

[0193] FIG. 172 shows the experimentally determined nucleic acid coding sequence (SEQ ID NO: 195) for RNA polymerase beta-prime chain (rpoC) from S. pneumoniae, as described in EXAMPLE 1.

[0194] FIG. 173 shows the amino acid sequence (SEQ ID NO: 196) for RNA polymerase beta-prime chain (rpoC) from S. pneumoniae, as predicted from the experimentally determined nucleotide sequence SEQ ID NO: 195 shown in FIG. 172.

[0195] FIG. 174 shows the primer sequences used to amplify the nucleic acid of SEQ ID NO: 195. The primers are SEQ ID NO: 197 and SEQ ID NO: 198.

[0196] FIG. 175 contains TABLE 43, which provides among other things a variety of data and other information on RNA polymerase beta-prime chain (rpoC) from S. pneumoniae.

[0197] FIG. 176 contains TABLE 44, which provides the results of several bioinformatic analyses relating to RNA polymerase beta-prime chain (rpoC) from S. pneumoniae.

[0198] FIG. 177 depicts the results of tryptic peptide mass spectrum peak searching for RNA polymerase beta-prime chain (rpoC) from S. pneumoniae, as described in EXAMPLE 9.

[0199] FIG. 178 shows the nucleic acid coding sequence (SEQ ID NO: 202) for RNA polymerase sigma-70 factor, with gene designation of rpoD, as predicted from the genomic sequence of S. pneumoniae. This predicted nucleic acid coding sequence was cloned and sequenced to produce the polynucleotide sequence shown in FIG. 180.

[0200] FIG. 179 shows the amino acid sequence (SEQ ID NO: 203) for RNA polymerase sigma-70 factor (rpoD) from S. pneumoniae, as predicted from the nucleotide sequence SEQ ID NO: 202 shown in FIG. 178.

[0201] FIG. 180 shows the experimentally determined nucleic acid coding sequence (SEQ ID NO: 204) for RNA polymerase sigma-70 factor (rpoD) from S. pneumoniae, as described in EXAMPLE 1.

[0202] FIG. 181 shows the amino acid sequence (SEQ ID NO: 205) for RNA polymerase sigma-70 factor (rpoD) from S. pneumoniae, as predicted from the experimentally determined nucleotide sequence SEQ ID NO: 204 shown in FIG. 180.

[0203] FIG. 182 shows the primer sequences used to amplify the nucleic acid of SEQ ID NO: 204. The primers are SEQ ID NO: 206 and SEQ ID) NO: 207.

[0204] FIG. 183 contains TABLE 45, which provides among other things a variety of data and other information on RNA polymerase sigma-70 factor (rpoD) from S. pneumoniae.

[0205] FIG. 184 contains TABLE 46, which provides the results of several bioinformatic analyses relating to RNA polymerase sigma-70 factor (rpoD) from S. pneumoniae.

[0206] FIG. 185 depicts a MALDI-TOF mass spectrum of RNA polymerase sigma-70 factor (rpoD) from S. pneumoniae, as described in EXAMPLE 10.

[0207] FIG. 186 shows the nucleic acid coding sequence (SEQ ID NO: 211) for transketolase 1 isozyme, with gene designation of tktA, as predicted from the genomic sequence of S. pneumoniae. This predicted nucleic acid coding sequence was cloned and sequenced to produce the polynucleotide sequence shown in FIG. 188.

[0208] FIG. 187 shows the amino acid sequence (SEQ ID NO: 212) for transketolase 1 isozyme (tktA) from S. pneumoniae, as predicted from the nucleotide sequence SEQ ID NO: 211 shown in FIG. 186.

[0209] FIG. 188 shows the experimentally determined nucleic acid coding sequence (SEQ ID NO: 213) for transketolase 1 isozyme (tktA) from S. pneumoniae, as described in EXAMPLE 1.

[0210] FIG. 189 shows the amino acid sequence (SEQ ID NO: 214) for transketolase 1 isozyme (tktA) from S. pneumoniae, as predicted from the experimentally determined nucleotide sequence SEQ ID NO: 213 shown in FIG. 188.

[0211] FIG. 190 shows the primer sequences used to amplify the nucleic acid of SEQ ID NO: 213. The primers are SEQ ID NO: 215 and SEQ ID NO: 216.

[0212] FIG. 191 contains TABLE 47, which provides among other things a variety of data and other information on transketolase 1 isozyme (tktA) from S. pneumoniae.

[0213] FIG. 192 contains TABLE 48, which provides the results of several bioinformatic analyses relating to transketolase 1 isozyme (tktA) from S. pneumoniae.

[0214] FIG. 193 depicts a MALDI-TOF mass spectrum of transketolase 1 isozyme (tktA) from S. pneumoniae, as described in EXAMPLE 10.

[0215] FIG. 194 shows the nucleic acid coding sequence (SEQ ID NO: 220) for tryptophan tRNA synthetase, with gene designation of trpS, as predicted from the genomic sequence of P. aeruginosa. This predicted nucleic acid coding sequence was cloned and sequenced to produce the polynucleotide sequence shown in FIG. 196.

[0216] FIG. 195 shows the amino acid sequence (SEQ ID NO: 221) for tryptophan tRNA synthetase (trpS) from P. aeruginosa, as predicted from the nucleotide sequence SEQ ID NO: 220 shown in FIG. 194.

[0217] FIG. 196 shows the experimentally determined nucleic acid coding sequence (SEQ ID NO: 222) for tryptophan tRNA synthetase (trpS) from P. aeruginosa, as described in EXAMPLE 1.

[0218] FIG. 197 shows the amino acid sequence (SEQ ID NO: 223) for tryptophan tRNA synthetase (trpS) from P. aeruginosa, as predicted from the experimentally determined nucleotide sequence SEQ ID NO: 222 shown in FIG. 196.

[0219] FIG. 198 shows the primer sequences used to amplify the nucleic acid of SEQ ID NO: 222. The primers are SEQ ID NO: 224 and SEQ ID NO: 225.

[0220] FIG. 199 contains TABLE 49, which provides among other things a variety of data and other information on tryptophan tRNA synthetase (trpS) from P. aeruginosa.

[0221] FIG. 200 contains TABLE 50, which provides the results of several bioinformatic analyses relating to tryptophan tRNA synthetase (trpS) from P. aeruginosa.

[0222] FIG. 201 depicts the results of tryptic peptide mass spectrum peak searching for tryptophan tRNA synthetase (trpS) from P. aeruginosa, as described in EXAMPLE 9.

[0223] FIG. 202 depicts a MALDI-TOF mass spectrum of tryptophan tRNA synthetase (trps) from P. aeruginosa, as described in EXAMPLE 10.

[0224] FIG. 203 shows the nucleic acid coding sequence (SEQ ID NO: 229) for holo-(acyl-carrier protein) synthase, with gene designation of acpS, as predicted from the genomic sequence of E. faecalis. This predicted nucleic acid coding sequence was cloned and sequenced to produce the polynucleotide sequence shown in FIG. 205.

[0225] FIG. 204 shows the amino acid sequence (SEQ ID NO: 230) for holo-(acyl-carrier protein) synthase (acpS) from E. faecalis, as predicted from the nucleotide sequence SEQ ID NO: 229 shown in FIG. 203.

[0226] FIG. 205 shows the experimentally determined nucleic acid coding sequence (SEQ ID NO: 231) for holo-(acyl-carrier protein) synthase (acpS) from E. faecalis, as described in EXAMPLE 1.

[0227] FIG. 206 shows the amino acid sequence (SEQ ID NO: 232) for holo-(acyl-carrier protein) synthase (acpS) from E. faecalis, as predicted from the experimentally determined nucleotide sequence SEQ ID NO: 231 shown in FIG. 205.

[0228] FIG. 207 shows the primer sequences used to amplify the nucleic acid of SEQ ID NO: 231. The primers are SEQ ID NO: 233 and SEQ ID NO: 234.

[0229] FIG. 208 contains TABLE 51, which provides among other things a variety of data and other information on holo-(acyl-carrier protein) synthase (acpS) from E. faecalis.

[0230] FIG. 209 contains TABLE 52, which provides the results of several bioinformatic analyses relating to holo-(acyl-carrier protein) synthase (acpS) from E. faecalis.

[0231] FIG. 210 depicts the results of tryptic peptide mass spectrum peak searching for holo-(acyl-carrier protein) synthase (acpS) from E. faecalis, as described in EXAMPLE 9.

[0232] FIG. 211 depicts a MALDI-TOF mass spectrum of holo-(acyl-carrier protein) synthase (acpS) from E. faecalis, as described in EXAMPLE 10.

[0233] FIG. 212 shows the nucleic acid coding sequence (SEQ ID NO: 238) for glutamate racemase, with gene designation of murI, as predicted from the genomic sequence of E. faecalis. This predicted nucleic acid coding sequence was cloned and sequenced to produce the polynucleotide sequence shown in FIG. 214.

[0234] FIG. 213 shows the amino acid sequence (SEQ ID NO: 239) for glutamate racemase (murI) from E. faecalis, as predicted from the nucleotide sequence SEQ ID NO: 238 shown in FIG. 212.

[0235] FIG. 214 shows the experimentally determined nucleic acid coding sequence (SEQ ID NO: 240) for glutamate racemase (murI) from E. faecalis, as described in EXAMPLE 1.

[0236] FIG. 215 shows the amino acid sequence (SEQ ID NO: 241) for glutamate racemase (murI) from E. faecalis, as predicted from the experimentally determined nucleotide sequence SEQ ID NO: 240 shown in FIG. 214.

[0237] FIG. 216 shows the primer sequences used to amplify the nucleic acid of SEQ ID NO: 240. The primers are SEQ ID NO: 242 and SEQ ID NO: 243.

[0238] FIG. 217 contains TABLE 53, which provides among other things a variety of data and other information on glutamate racemase (murI) from E. faecalis.

[0239] FIG. 218 contains TABLE 54, which provides the results of several bioinformatic analyses relating to glutamate racemase (murI) from E. faecalis.

[0240] FIG. 219 depicts a MALDI-TOF mass spectrum of glutamate racemase (murI) from E. faecalis, as described in EXAMPLE 10.

[0241] FIG. 220 shows the nucleic acid coding sequence (SEQ ID NO: 247) for glutamate racemase, with gene designation of murI, as predicted from the genomic sequence of S. pneumoniae. This predicted nucleic acid coding sequence was cloned and sequenced to produce the polynucleotide sequence shown in FIG. 91.

[0242] FIG. 221 shows the amino acid sequence (SEQ ID NO: 248) for glutamate racemase (murI) from S. pneumoniae, as predicted from the nucleotide sequence SEQ ID NO: 247 shown in FIG. 220.

[0243] FIG. 222 shows the experimentally determined nucleic acid coding sequence (SEQ ID NO: 249) for glutamate racemase (murI) from S. pneumoniae, as described in EXAMPLE 1.

[0244] FIG. 223 shows the amino acid sequence (SEQ ID NO: 250) for glutamate racemase (murI) from S. pneumoniae, as predicted from the experimentally determined nucleotide sequence SEQ ID NO: 105 shown in FIG. 91.

[0245] FIG. 224 shows the primer sequences used to amplify the nucleic acid of SEQ ID NO: 105. The primers are SEQ ID NO: 251 and SEQ ID NO: 252.

[0246] FIG. 225 contains TABLE 55, which provides among other things a variety of data and other information on glutamate racemase (murI) from S. pneumoniae.

[0247] FIG. 226 contains TABLE 56, which provides the results of several bioinformatic analyses relating to glutamate racemase (murI) from S. pneumoniae.

[0248] FIG. 227 depicts a MALDI-TOF mass spectrum of glutamate racemase (murI) from S. pneumoniae, as described in EXAMPLE 10.

[0249] FIG. 228 shows the nucleic acid coding sequence (SEQ ID NO: 256) for ribonuceloside diphosphate reductase alpha subunit, with gene designation of nrdE, as predicted from the genomic sequence of E. faecalis. This predicted nucleic acid coding sequence was cloned and sequenced to produce the polynucleotide sequence shown in FIG. 230.

[0250] FIG. 229 shows the amino acid sequence (SEQ ID NO: 257) for ribonuceloside diphosphate reductase alpha subunit (nrdE) from E. faecalis, as predicted from the nucleotide sequence SEQ ID NO: 256 shown in FIG. 228.

[0251] FIG. 230 shows the experimentally determined nucleic acid coding sequence (SEQ ID NO: 258) for ribonuceloside diphosphate reductase alpha subunit (nrdE) from E. faecalis, as described in EXAMPLE 1.

[0252] FIG. 231 shows the amino acid sequence (SEQ ID NO: 259) for ribonuceloside diphosphate reductase alpha subunit (nrdE) from E. faecalis, as predicted from the experimentally determined nucleotide sequence SEQ ID NO: 258 shown in FIG. 230.

[0253] FIG. 232 shows the primer sequences used to amplify the nucleic acid of SEQ ID NO: 258. The primers are SEQ ID NO: 260 and SEQ ID NO: 261.

[0254] FIG. 233 contains TABLE 57, which provides among other things a variety of data and other information on ribonuceloside diphosphate reductase alpha subunit (nrdE) from E. faecalis.

[0255] FIG. 234 contains TABLE 58, which provides the results of several bioinformatic analyses relating to ribonuceloside diphosphate reductase alpha subunit (nrdE) from E. faecalis.

[0256] FIG. 235 depicts the results of tryptic peptide mass spectrum peak searching for ribonuceloside diphosphate reductase alpha subunit (nrdE) from E. faecalis, as described in EXAMPLE 9.

[0257] FIG. 236 depicts a MALDI-TOF mass spectrum of ribonuceloside diphosphate reductase alpha subunit (nrdE) from E. faecalis, as described in EXAMPLE 10.

[0258] FIG. 237 shows the nucleic acid coding sequence (SEQ ID NO: 265) for gamma-glutamyl phosphate reductase, with gene designation of proA, as predicted from the genomic sequence of E. faecalis. This predicted nucleic acid coding sequence was cloned and sequenced to produce the polynucleotide sequence shown in FIG. 91.

[0259] FIG. 238 shows the amino acid sequence (SEQ ID NO: 266) for gamma-glutamyl phosphate reductase (proA) from E. faecalis, as predicted from the nucleotide sequence SEQ ID NO: 265 shown in FIG. 237.

[0260] FIG. 239 shows the experimentally determined nucleic acid coding sequence (SEQ ID NO: 267) for gamma-glutamyl phosphate reductase (proA) from E. faecalis, as described in EXAMPLE 1.

[0261] FIG. 240 shows the amino acid sequence (SEQ ID NO: 268) for gamma-glutamyl phosphate reductase (proA) from E. faecalis, as predicted from the experimentally determined nucleotide sequence SEQ ID NO: 267 shown in FIG. 239.

[0262] FIG. 241 shows the primer sequences used to amplify the nucleic acid of SEQ ID NO: 267. The primers are SEQ ID NO: 269 and SEQ ID NO: 270.

[0263] FIG. 242 contains TABLE 59, which provides among other things a variety of data and other information on gamma-glutamyl phosphate reductase (proA) from E. faecalis.

[0264] FIG. 243 contains TABLE 60, which provides the results of several bioinformatic analyses relating to gamma-glutamyl phosphate reductase (proA) from E. faecalis.

[0265] FIG. 244 depicts the results of tryptic peptide mass spectrum peak searching for gamma-glutamyl phosphate reductase (proA) from E. faecalis, as described in EXAMPLE 9.

[0266] FIG. 245 depicts a MALDI-TOF mass spectrum of gamma-glutamyl phosphate reductase (proA) from E. faecalis, as described in EXAMPLE 10.

[0267] FIG. 246 shows the nucleic acid coding sequence (SEQ ID NO: 274) for triosephosphate isomerase, with gene designation of tpiA, as predicted from the genomic sequence of E. faecalis. This predicted nucleic acid coding sequence was cloned and sequenced to produce the polynucleotide sequence shown in FIG. 248.

[0268] FIG. 247 shows the amino acid sequence (SEQ ID NO: 275) for triosephosphate isomerase (tpiA) from E. faecalis, as predicted from the nucleotide sequence SEQ ID NO: 274 shown in FIG. 246.

[0269] FIG. 248 shows the experimentally determined nucleic acid coding sequence (SEQ ID NO: 276) for triosephosphate isomerase (tpiA) from E. faecalis, as described in EXAMPLE 1.

[0270] FIG. 249 shows the amino acid sequence (SEQ ID NO: 277) for triosephosphate isomerase (tpiA) from E. faecalis, as predicted from the experimentally determined nucleotide sequence SEQ ID NO: 276 shown in FIG. 248.

[0271] FIG. 250 shows the primer sequences used to amplify the nucleic acid of SEQ ID NO: 276. The primers are SEQ ID NO: 278 and SEQ ID NO: 279.

[0272] FIG. 251 contains TABLE 61, which provides among other things a variety of data and other information on triosephosphate isomerase (tpiA) from E. faecalis.

[0273] FIG. 252 contains TABLE 62, which provides the results of several bioinformatic analyses relating to triosephosphate isomerase (tpiA) from E. faecalis.

[0274] FIG. 253 depicts the results of tryptic peptide mass spectrum peak searching for triosephosphate isomerase (tpiA) from E. faecalis, as described in EXAMPLE 9.

[0275] FIG. 254 depicts a MALDI-TOF mass spectrum of triosephosphate isomerase (tpiA) from E. faecalis, as described in EXAMPLE 10.

[0276] FIG. 255 shows the nucleic acid coding sequence (SEQ ID NO: 283) for triosephosphate isomerase, with gene designation of tpiA, as predicted from the genomic sequence of S. pneumoniae. This predicted nucleic acid coding sequence was cloned and sequenced to produce the polynucleotide sequence shown in FIG. 257.

[0277] FIG. 256 shows the amino acid sequence (SEQ ID NO: 284) for triosephosphate isomerase (tpiA) from S. pneumoniae, as predicted from the nucleotide sequence SEQ ID NO: 283 shown in FIG. 255.

[0278] FIG. 257 shows the experimentally determined nucleic acid coding sequence (SEQ ID NO: 285) for triosephosphate isomerase (tpiA) from S. pneumoniae, as described in EXAMPLE 1.

[0279] FIG. 258 shows the amino acid sequence (SEQ ID NO: 286) for triosephosphate isomerase (tpiA) from S. pneumoniae, as predicted from the experimentally determined nucleotide sequence SEQ ID NO: 285 shown in FIG. 257.

[0280] FIG. 259 shows the primer sequences used to amplify the nucleic acid of SEQ ID NO: 285. The primers are SEQ ID NO: 287 and SEQ ID NO: 288.

[0281] FIG. 260 contains TABLE 63, which provides among other things a variety of data and other information on triosephosphate isomerase (tpiA) from S. pneumoniae.

[0282] FIG. 261 contains TABLE 64, which provides the results of several bioinformatic analyses relating to triosephosphate isomerase (tpiA) from S. pneumoniae.

[0283] FIG. 262 depicts a ¹H, ¹⁵N Heteronuclear Single Quantum Coherence (HSQC) spectrum of triosephosphate isomerase (tpiA) from S. pneumoniae, as described in EXAMPLE 15 below. The X-axis shows a proton chemical shift, while the Y-axis shows the ¹⁵N chemical shift of the purified ¹⁵N labeled polypeptide.

[0284] FIG. 263 depicts a MALDI-TOF mass spectrum of triosephosphate isomerase (tpiA) from S. pneumoniae, as described in EXAMPLE 10.

[0285] FIG. 264 shows the nucleic acid coding sequence (SEQ ID NO: 292) for branched-chain alpha-keto acid dehydrogenase, with gene designation of bkdB, as predicted from the genomic sequence of P. aeruginosa. This predicted nucleic acid coding sequence was cloned and sequenced to produce the polynucleotide sequence shown in FIG. 266.

[0286] FIG. 265 shows the amino acid sequence (SEQ ID NO: 293) for branched-chain alpha-keto acid dehydrogenase (bkdB) from P. aeruginosa, as predicted from the nucleotide sequence SEQ ID NO: 292 shown in FIG. 266.

[0287] FIG. 266 shows the experimentally determined nucleic acid coding sequence (SEQ ID NO: 294) for branched-chain alpha-keto acid dehydrogenase (bkdB) from P. aeruginosa, as described in EXAMPLE 1.

[0288] FIG. 267 shows the amino acid sequence (SEQ ID NO: 295) for branched-chain alpha-keto acid dehydrogenase (bkdB) from P. aeruginosa, as predicted from the experimentally determined nucleotide sequence SEQ ID NO: 294 shown in FIG. 266.

[0289] FIG. 268 shows the primer sequences used to amplify the nucleic acid of SEQ ID NO: 294. The primers are SEQ ID NO: 296 and SEQ ID NO: 297.

[0290] FIG. 269 contains TABLE 65, which provides among other things a variety of data and other information on branched-chain alpha-keto acid dehydrogenase (bkdB) from P. aeruginosa.

[0291] FIG. 270 contains TABLE 66, which provides the results of several bioinformatic analyses relating to branched-chain alpha-keto acid dehydrogenase (bkdB) from P. aeruginosa.

[0292] FIG. 271 depicts a MALDI-TOF mass spectrum of branched-chain alpha-keto acid dehydrogenase (bkdB) from P. aeruginosa, as described in EXAMPLE 10.

[0293] FIG. 272 shows the nucleic acid coding sequence (SEQ ID NO: 301) for tetrahydrodipicolinate (THDP) N-succinyltransferase, with gene designation of dapD, as predicted from the genomic sequence of E. faecalis. This predicted nucleic acid coding sequence was cloned and sequenced to produce the polynucleotide sequence shown in FIG. 91.

[0294] FIG. 273 shows the amino acid sequence (SEQ ID NO: 302) for tetrahydrodipicolinate (THDP) N-succinyltransferase (dapD) from E. faecalis, as predicted from the nucleotide sequence SEQ ID NO: 301 shown in FIG. 272.

[0295] FIG. 274 shows the experimentally determined nucleic acid coding sequence (SEQ ID NO: 303) for tetrahydrodipicolinate (THDP) N-succinyltransferase (dapD) from E. faecalis, as described in EXAMPLE 1.

[0296] FIG. 275 shows the amino acid sequence (SEQ ID NO: 304) for tetrahydrodipicolinate (THDP) N-succinyltransferase (dapD) from E. faecalis, as predicted from the experimentally determined nucleotide sequence SEQ ID NO: 303 shown in FIG. 274.

[0297] FIG. 276 shows the primer sequences used to amplify the nucleic acid of SEQ ID NO: 303. The primers are SEQ ID NO: 305 and SEQ ID NO: 306.

[0298] FIG. 277 contains TABLE 67, which provides among other things a variety of data and other information on tetrahydrodipicolinate (THDP) N-succinyltransferase (dapD) from E. faecalis.

[0299] FIG. 278 contains TABLE 68, which provides the results of several bioinformatic analyses relating to tetrahydrodipicolinate (THDP) N-succinyltransferase (dapD) from E. faecalis.

[0300] FIG. 279 depicts the results of tryptic peptide mass spectrum peak searching for tetrahydrodipicolinate (THDP) N-succinyltransferase (dapD) from E. faecalis, as described in EXAMPLE 9.

[0301] FIG. 280 shows the nucleic acid coding sequence (SEQ ID NO: 310) for elongation factor P (EF-P), with gene designation of efp, as predicted from the genomic sequence of P. aeruginosa. This predicted nucleic acid coding sequence was cloned and sequenced to produce the polynucleotide sequence shown in FIG. 282.

[0302] FIG. 281 shows the amino acid sequence (SEQ ID NO: 311) for elongation factor P (EF-P) (efp) from P. aeruginosa, as predicted from the nucleotide sequence SEQ ID NO: 310 shown in FIG. 280.

[0303] FIG. 282 shows the experimentally determined nucleic acid coding sequence (SEQ ID NO: 312) for elongation factor P (EF-P) (efp) from P. aeruginosa, as described in EXAMPLE 1.

[0304] FIG. 283 shows the amino acid sequence (SEQ ID NO: 313) for elongation factor P (EF-P) (efp) from P. aeruginosa, as predicted from the experimentally determined nucleotide sequence SEQ ID NO: 312 shown in FIG. 282.

[0305] FIG. 284 shows the primer sequences used to amplify the nucleic acid of SEQ ID NO: 312. The primers are SEQ ID NO: 314 and SEQ ID NO: 315.

[0306] FIG. 285 contains TABLE 69, which provides among other things a variety of data and other information on elongation factor P (EF-P) (efp) from P. aeruginosa.

[0307] FIG. 286 contains TABLE 70, which provides the results of several bioinformatic analyses relating to elongation factor P (EF-P) (efp) from P. aeruginosa.

[0308] FIG. 287 depicts the results of tryptic peptide mass spectrum peak searching for elongation factor P (EF-P) (efp) from P. aeruginosa, as described in EXAMPLE 9.

[0309] FIG. 288 depicts a MALDI-TOF mass spectrum of elongation factor P (EF-P) (efp) from P. aeruginosa, as described in EXAMPLE 10.

[0310] FIG. 289 shows the nucleic acid coding sequence (SEQ ID NO: 319) for fructose-bisphosphate aldolase, with gene designation of fbaA, as predicted from the genomic sequence of E. faecalis. This predicted nucleic acid coding sequence was cloned and sequenced to produce the polynucleotide sequence shown in FIG. 91.

[0311] FIG. 290 shows the amino acid sequence (SEQ ID NO: 320) for fructose-bisphosphate aldolase (fbaA) from E. faecalis, as predicted from the nucleotide sequence SEQ ID NO: 319 shown in FIG. 289.

[0312] FIG. 291 shows the experimentally determined nucleic acid coding sequence (SEQ ID NO: 321) for fructose-bisphosphate aldolase (fbaA) from E. faecalis, as described in EXAMPLE 1.

[0313] FIG. 292 shows the amino acid sequence (SEQ ID NO: 322) for fructose-bisphosphate aldolase (fbaA) from E. faecalis, as predicted from the experimentally determined nucleotide sequence SEQ ID NO: 321 shown in FIG. 291.

[0314] FIG. 293 shows the primer sequences used to amplify the nucleic acid of SEQ ID NO: 321. The primers are SEQ ID NO: 323 and SEQ ID NO: 324.

[0315] FIG. 294 contains TABLE 71, which provides among other things a variety of data and other information on fructose-bisphosphate aldolase (fbaA) from E. faecalis.

[0316] FIG. 295 contains TABLE 72, which provides the results of several bioinformatic analyses relating to fructose-bisphosphate aldolase (fbaA) from E. faecalis.

[0317] FIG. 296 depicts a MALDI-TOF mass spectrum of fructose-bisphosphate aldolase (fbaA) from E. faecalis, as described in EXAMPLE 10.

[0318] FIG. 297 shows the nucleic acid coding sequence (SEQ ID NO: 328) for isopentenyl diphosphate isomerase, with gene designation of fni, as predicted from the genomic sequence of E. faecalis. This predicted nucleic acid coding sequence was cloned and sequenced to produce the polynucleotide sequence shown in FIG. 299.

[0319] FIG. 298 shows the amino acid sequence (SEQ ID NO: 329) for isopentenyl diphosphate isomerase (fni) from E. faecalis, as predicted from the nucleotide sequence SEQ ID NO: 328 shown in FIG. 297.

[0320] FIG. 299 shows the experimentally determined nucleic acid coding sequence (SEQ ID NO: 330) for isopentenyl diphosphate isomerase (fni) from E. faecalis, as described in EXAMPLE 1.

[0321] FIG. 300 shows the amino acid sequence (SEQ ID NO: 331) for isopentenyl diphosphate isomerase (fni) from E. faecalis, as predicted from the experimentally determined nucleotide sequence FIG. 299 shown in FIG. 299.

[0322] FIG. 301 shows the primer sequences used to amplify the nucleic acid of FIG. 299. The primers are SEQ ID NO: 332 and SEQ ID NO: 333.

[0323] FIG. 302 contains TABLE 73, which provides among other things a variety of data and other information on isopentenyl diphosphate isomerase (fni) from E. faecalis.

[0324] FIG. 303 contains TABLE 74, which provides the results of several bioinformatic analyses relating to isopentenyl diphosphate isomerase (fni) from E. faecalis.

[0325] FIG. 304 depicts the results of tryptic peptide mass spectrum peak searching for isopentenyl diphosphate isomerase (fni) from E. faecalis, as described in EXAMPLE 9.

[0326] FIG. 305 depicts a MALDI-TOF mass spectrum of isopentenyl diphosphate isomerase (fni) from E. faecalis, as described in EXAMPLE 10.

[0327] FIG. 306 shows the nucleic acid coding sequence (SEQ ID NO: 337) for glutamate dehydrogenase, with gene designation of gdhA, as predicted from the genomic sequence of E. faecalis. This predicted nucleic acid coding sequence was cloned and sequenced to produce the polynucleotide sequence shown in FIG. 308.

[0328] FIG. 307 shows the amino acid sequence (SEQ ID NO: 338) for glutamate dehydrogenase (gdhA) from E. faecalis, as predicted from the nucleotide sequence SEQ ID NO: 337 shown in FIG. 306.

[0329] FIG. 308 shows the experimentally determined nucleic acid coding sequence (SEQ ID NO: 339) for glutamate dehydrogenase (gdhA) from E. faecalis, as described in EXAMPLE 1.

[0330] FIG. 309 shows the amino acid sequence (SEQ ID NO: 340) for glutamate dehydrogenase (gdhA) from E. faecalis, as predicted from the experimentally determined nucleotide sequence SEQ ID NO: 339 shown in FIG. 308.

[0331] FIG. 310 shows the primer sequences used to amplify the nucleic acid of SEQ ID NO: 339. The primers are SEQ ID NO: 341 and SEQ ID NO: 342.

[0332] FIG. 311 contains TABLE 75, which provides among other things a variety of data and other information on glutamate dehydrogenase (gdhA) from E. faecalis.

[0333] FIG. 312 contains TABLE 76, which provides the results of several bioinformatic analyses relating to glutamate dehydrogenase (gdhA) from E. faecalis.

[0334] FIG. 313 depicts the results of tryptic peptide mass spectrum peak searching for glutamate dehydrogenase (gdhA) from E. faecalis, as described in EXAMPLE 9.

[0335] FIG. 314 depicts a MALDI-TOF mass spectrum of glutamate dehydrogenase (gdhA) from E. faecalis, as described in EXAMPLE 10.

[0336] FIG. 315 shows the nucleic acid coding sequence (SEQ ID NO: 346) for GroEL protein, with gene designation of groEL, as predicted from the genomic sequence of S. pneumoniae. This predicted nucleic acid coding sequence was cloned and sequenced to produce the polynucleotide sequence shown in FIG. 317.

[0337] FIG. 316 shows the amino acid sequence (SEQ ID NO: 347) for GroEL protein (groEL) from S. pneumoniae, as predicted from the nucleotide sequence SEQ ID NO: 346 shown in FIG. 315.

[0338] FIG. 317 shows the experimentally determined nucleic acid coding sequence (SEQ ID NO: 348) for GroEL protein (groEL) from S. pneumoniae, as described in EXAMPLE 1.

[0339] FIG. 318 shows the amino acid sequence (SEQ ID NO: 349) for GroEL protein (groEL) from S. pneumoniae, as predicted from the experimentally determined nucleotide sequence SEQ ID NO: 348 shown in FIG. 317.

[0340] FIG. 319 shows the primer sequences used to amplify the nucleic acid of SEQ ID NO: 348. The primers are SEQ ID NO: 350 and SEQ ID NO: 351.

[0341] FIG. 320 contains TABLE 77, which provides among other things a variety of data and other information on GroEL protein (groEL) from S. pneumoniae.

[0342] FIG. 321 contains TABLE 78, which provides the results of several bioinformatic analyses relating to GroEL protein (groEL) from S. pneumoniae.

[0343] FIG. 322 depicts the results of tryptic peptide mass spectrum peak searching for GroEL protein (groEL) from S. pneumoniae, as described in EXAMPLE 9.

[0344] FIG. 323 depicts a MALDI-TOF mass spectrum of GroEL protein (groEL) from S. pneumoniae, as described in EXAMPLE 10.

[0345] FIG. 324 shows the nucleic acid coding sequence (SEQ ID NO: 355) for ATP-binding component of molybdate transport system, with gene designation of modF, as predicted from the genomic sequence of S. aureus. This predicted nucleic acid coding sequence was cloned and sequenced to produce the polynucleotide sequence shown in FIG. 326.

[0346] FIG. 325 shows the amino acid sequence (SEQ ID NO: 356) for ATP-binding component of molybdate transport system (modF) from S. aureus, as predicted from the nucleotide sequence SEQ ID NO: 355 shown in FIG. 324.

[0347] FIG. 326 shows the experimentally determined nucleic acid coding sequence (SEQ ID NO: 357) for ATP-binding component of molybdate transport system (modF) from S. aureus, as described in EXAMPLE 1.

[0348] FIG. 327 shows the amino acid sequence (SEQ ID NO: 358) for ATP-binding component of molybdate transport system (modF) from S. aureus, as predicted from the experimentally determined nucleotide sequence SEQ ID NO: 357 shown in FIG. 326.

[0349] FIG. 328 shows the primer sequences used to amplify the nucleic acid of SEQ ID NO: 357. The primers are SEQ ID NO: 359 and SEQ ID NO: 360.

[0350] FIG. 329 contains TABLE 79, which provides among other things a variety of data and other information on ATP-binding component of molybdate transport system (modF) from S. aureus.

[0351] FIG. 330 contains TABLE 80, which provides the results of several bioinformatic analyses relating to ATP-binding component of molybdate transport system (modF) from S. aureus.

[0352] FIG. 331 depicts the results of tryptic peptide mass spectrum peak searching for ATP-binding component of molybdate transport system (modF) from S. aureus, as described in EXAMPLE 9.

[0353] FIG. 332 shows the nucleic acid coding sequence (SEQ ID NO: 364) for DNA topoisomerase IV subunit A, with gene designation of parC, as predicted from the genomic sequence of P. aeruginosa. This predicted nucleic acid coding sequence was cloned and sequenced to produce the polynucleotide sequence shown in FIG. 334.

[0354] FIG. 333 shows the amino acid sequence (SEQ ID NO: 365) for DNA topoisomerase IV subunit A (parC) from P. aeruginosa, as predicted from the nucleotide sequence SEQ ID NO: 364 shown in FIG. 332.

[0355] FIG. 334 shows the experimentally determined nucleic acid coding sequence (SEQ ID NO: 366) for DNA topoisomerase IV subunit A (parC) from P. aeruginosa, as described in EXAMPLE 1.

[0356] FIG. 335 shows the amino acid sequence (SEQ ID NO: 367) for DNA topoisomerase IV subunit A (parC) from P. aeruginosa, as predicted from the experimentally determined nucleotide sequence SEQ ID NO: 366 shown in FIG. 334.

[0357] FIG. 336 shows the primer sequences used to amplify the nucleic acid of SEQ ID NO: 366. The primers are SEQ ID NO: 368 and SEQ ID NO: 369.

[0358] FIG. 337 contains TABLE 81, which provides among other things a variety of data and other information on DNA topoisomerase IV subunit A (parC) from P. aeruginosa.

[0359] FIG. 338 contains TABLE 82, which provides the results of several bioinformatic analyses relating to DNA topoisomerase IV subunit A (parC) from P. aenrginosa.

[0360] FIG. 339 depicts the results of tryptic peptide mass spectrum peak searching for DNA topoisomerase IV subunit A (parC) from P. aeruginosa, as described in EXAMPLE 9.

[0361] FIG. 340 shows the nucleic acid coding sequence (SEQ ID NO: 373) for GTP cyclohydrolase II, with gene designation of ribA, as predicted from the genomic sequence of S. pneumoniae. This predicted nucleic acid coding sequence was cloned and sequenced to produce the polynucleotide sequence shown in FIG. 342.

[0362] FIG. 341 shows the amino acid sequence (SEQ. ID NO: 374) for GTP cyclohydrolase II (ribA) from S. pneumoniae, as predicted from the nucleotide sequence SEQ ID NO: 373 shown in FIG. 340.

[0363] FIG. 342 shows the experimentally determined nucleic acid coding sequence (SEQ ID NO: 375) for GTP cyclohydrolase II (ribA) from S. pneumoniae, as described in EXAMPLE 1.

[0364] FIG. 343 shows the amino acid sequence (SEQ ID NO: 376) for GTP cyclohydrolase II (ribA) from S. pneumoniae, as predicted from the experimentally determined nucleotide sequence SEQ ID NO: 375shown in FIG. 342.

[0365] FIG. 344 shows the primer sequences used to amplify the nucleic acid of SEQ ID NO: 375. The primers are SEQ ID NO: 377 and SEQ ID NO: 378.

[0366] FIG. 345 contains TABLE 83, which provides among other things a variety of data and other information on GTP cyclohydrolase II (ribA) from S. pneumoniae.

[0367] FIG. 346 contains TABLE 84, which provides the results of several bioinformatic analyses relating to GTP cyclohydrolase II (ribA) from S. pneumoniae.

[0368] FIG. 347 depicts a MALDI-TOF mass spectrum of GTP cyclohydrolase II (ribA) from S. pneumoniae, as described in EXAMPLE 10.

[0369] FIG. 348 shows the nucleic acid coding sequence (SEQ ID NO: 382) for putative aspartate-semialdehyde dehydrogenase, with gene designation of usg, as predicted from the genomic sequence of E. faecalis. This predicted nucleic acid coding sequence was cloned and sequenced to produce the polynucleotide sequence shown in FIG. 350.

[0370] FIG. 349 shows the amino acid sequence (SEQ ID NO: 383) for putative aspartate-semialdehyde dehydrogenase (usg) from E. faecalis, as predicted from the nucleotide sequence SEQ ID NO: 382 shown in FIG. 348.

[0371] FIG. 350 shows the experimentally determined nucleic acid coding sequence (SEQ ID NO: 384) for putative aspartate-semialdehyde dehydrogenase (usg) from E. faecalis, as described in EXAMPLE 1.

[0372] FIG. 351 shows the amino acid sequence (SEQ ID NO: 385) for putative aspartate-semialdehyde dehydrogenase (usg) from E. faecalis, as predicted from the experimentally determined nucleotide sequence SEQ ID NO: 384 shown in FIG. 350.

[0373] FIG. 352 shows the primer sequences used to amplify the nucleic acid of SEQ ID NO: 384. The primers are SEQ ID NO: 386 and SEQ ID NO: 387.

[0374] FIG. 353 contains TABLE 85, which provides among other things a variety of data and other information on putative aspartate-semialdehyde dehydrogenase (usg) from E. faecalis.

[0375] FIG. 354 contains TABLE 86, which provides the results of several bioinformatic analyses relating to putative aspartate-semialdehyde dehydrogenase (usg) from E. faecalis.

[0376] FIG. 355 depicts a MALDI-TOF mass spectrum of putative aspartate-semialdehyde dehydrogenase (usg) from E. faecalis, as described in EXAMPLE 10.

[0377] FIG. 356 shows the nucleic acid coding sequence (SEQ ID NO: 391) for elongation factor P (EF-P), with gene designation of efp, as predicted from the genomic sequence of H. pylori. This predicted nucleic acid coding sequence was cloned and sequenced to produce the polynucleotide sequence shown in FIG. 358.

[0378] FIG. 357 shows the amino acid sequence (SEQ ID NO: 392) for elongation factor P (EF-P) (efp) from H. pylori, as predicted from the nucleotide sequence SEQ ID NO: 391 shown in FIG. 356.

[0379] FIG. 358 shows the experimentally determined nucleic acid coding sequence (SEQ ID NO: 393) for elongation factor P (EF-P) (efp) from H. pylori, as described in EXAMPLE 1.

[0380] FIG. 359 shows the amino acid sequence (SEQ ID NO: 394) for elongation factor P (EF-P) (efp) from H. pylori, as predicted from the experimentally determined nucleotide sequence SEQ ID NO: 393 shown in FIG. 358.

[0381] FIG. 360 shows the primer sequences used to amplify the nucleic acid of SEQ ID NO: 393. The primers are SEQ ID NO: 395 and SEQ ID NO: 396.

[0382] FIG. 361 contains TABLE 87, which provides among other things a variety of data and other information on elongation factor P (EF-P) (efp) from H. pylori.

[0383] FIG. 362 contains TABLE 88, which provides the results of several bioinformatic analyses relating to elongation factor P (EF-P) (efp) from H. pylori.

[0384] FIG. 363 depicts a ¹H, ¹⁵N Heteronuclear Single Quantum Coherence (HSQC) spectrum of elongation factor P (EF-P) (efp) from H. pylori, as described in EXAMPLE 15 below. The X-axis shows a proton chemical shift, while the Y-axis shows the ¹⁵N chemical shift of the purified ¹⁵N labeled polypeptide.

[0385] FIG. 364 depicts the results of tryptic peptide mass spectrum peak searching for elongation factor P (EF-P) (efp) from H. pylori, as described in EXAMPLE 9.

[0386] FIG. 365 depicts a MALDI-TOF mass spectrum of elongation factor P (EF-P) (efp) from H. pylori, as described in EXAMPLE 10.

[0387] FIG. 366 shows the nucleic acid coding sequence (SEQ ID NO: 400) for GroES protein, with gene designation of groES, as predicted from the genomic sequence of S. aureus. This predicted nucleic acid coding sequence was cloned and sequenced to produce the polynucleotide sequence shown in FIG. 368.

[0388] FIG. 367 shows the amino acid sequence (SEQ ID NO: 401) for GroES protein (groES) from S. aureus, as predicted from the nucleotide sequence SEQ ID NO: 400 shown in FIG. 366.

[0389] FIG. 368 shows the experimentally determined nucleic acid coding sequence (SEQ ID NO: 402) for GroES protein (groES) from S. aureus, as described in EXAMPLE 1.

[0390] FIG. 369 shows the amino acid sequence (SEQ ID NO: 403) for GroES protein (groES) from S. aureus, as predicted from the experimentally determined nucleotide sequence SEQ ID NO: 402 shown in FIG. 368.

[0391] FIG. 370 shows the primer sequences used to amplify the nucleic acid of SEQ ID NO: 402. The primers are SEQ ID NO: 404 and SEQ ID NO: 405.

[0392] FIG. 371 contains TABLE 89, which provides among other things a variety of data and other information on GroES protein (groES) from S. aureus.

[0393] FIG. 372 contains TABLE 90, which provides the results of several bioinformatic analyses relating to GroES protein (groES) from S. aureus.

[0394] FIG. 373 shows the nucleic acid coding sequence (SEQ ID NO: 409) for GroES protein, with gene designation of groES, as predicted from the genomic sequence of P. aeruginosa. This predicted nucleic acid coding sequence was cloned and sequenced to produce the polynucleotide sequence shown in FIG. 375.

[0395] FIG. 374 shows the amino acid sequence (SEQ ID NO: 410) for GroES protein (groES) from P. aeruginosa, as predicted from the nucleotide sequence SEQ ID NO: 409 shown in FIG. 373.

[0396] FIG. 375 shows the experimentally determined nucleic acid coding sequence (SEQ ID NO: 411) for GroES protein (groES) from P. aeruginosa, as described in EXAMPLE 1.

[0397] FIG. 376 shows the amino acid sequence (SEQ ID NO: 412) for GroES protein (groES) from P. aeruginosa, as predicted from the experimentally determined nucleotide sequence SEQ ID NO: 411 shown in FIG. 375.

[0398] FIG. 377 shows the primer sequences used to amplify the nucleic acid of SEQ ID NO: 411. The primers are SEQ ID NO: 413 and SEQ ID NO: 414.

[0399] FIG. 378 contains TABLE 91, which provides among other things a variety of data and other information on GroES protein (groES) from P. aeruginosa.

[0400] FIG. 379 contains TABLE 92, which provides the results of several bioinformatic analyses relating to GroES protein (groES) from P. aeruginosa.

[0401] FIG. 380 shows the nucleic acid coding sequence (SEQ ID NO: 418) for GroES protein, with gene designation of groES, as predicted from the genomic sequence of H. pylori. This predicted nucleic acid coding sequence was cloned and sequenced to produce the polynucleotide sequence shown in FIG. 382.

[0402] FIG. 381 shows the amino acid sequence (SEQ ID NO: 419) for GroES protein (groES) from H. pylori, as predicted from the nucleotide sequence SEQ ID NO: 418 shown in FIG. 380.

[0403] FIG. 382 shows the experimentally determined nucleic acid coding sequence (SEQ ID NO: 420) for GroES protein (groES) from H. pylori, as described in EXAMPLE 1.

[0404] FIG. 383 shows the amino acid sequence (SEQ ID NO: 421) for GroES protein (groES) from H. pylori, as predicted from the experimentally determined nucleotide sequence SEQ ID NO: 420 shown in FIG. 382.

[0405] FIG. 384 shows the primer sequences used to amplify the nucleic acid of SEQ ID NO: 420. The primers are SEQ ID NO: 422 and SEQ ID NO: 423.

[0406] FIG. 385 contains TABLE 93, which provides among other things a variety of data and other information on GroES protein (groES) from H. pylori.

[0407] FIG. 386 contains TABLE 94, which provides the results of several bioinformatic analyses relating to GroES protein (groES) from H. pylori.

[0408] FIG. 387 shows the nucleic acid coding sequence (SEQ ID NO: 427) for transcription termination factor NusG, with gene designation of nusG, as predicted from the genomic sequence of E. coli. This predicted nucleic acid coding sequence was cloned and sequenced to produce the polynucleotide sequence shown in FIG. 389.

[0409] FIG. 388 shows the amino acid sequence (SEQ ID NO: 428) for transcription termination factor NusG (nusG) from E. coli, as predicted from the nucleotide sequence SEQ ID NO: 427 shown in FIG. 387.

[0410] FIG. 389 shows the experimentally determined nucleic acid coding sequence (SEQ ID NO: 429) for transcription termination factor NusG (nusG) from E. coli, as described in EXAMPLE 1.

[0411] FIG. 390 shows the amino acid sequence (SEQ ID NO: 430) for transcription termination factor NusG (nusG) from E. coli, as predicted from the experimentally determined nucleotide sequence SEQ ID NO: 429 shown in FIG. 389.

[0412] FIG. 391 shows the primer sequences used to amplify the nucleic acid of SEQ ID NO: 429. The primers are SEQ ID NO: 431 and SEQ ID NO: 432.

[0413] FIG. 392 contains TABLE 95, which provides among other things a variety of data and other information on transcription termination factor NusG (nusG) from E. coli.

[0414] FIG. 393 contains TABLE 96, which provides the results of several bioinformatic analyses relating to transcription termination factor NusG (nusG) from E. coli.

[0415] FIG. 394 depicts a ¹H, ¹⁵N Heteronuclear Single Quantum Coherence (HSQC) spectrum of transcription termination factor NusG (nusG) from E. coli, as described in EXAMPLE 15 below. The X-axis shows a proton chemical shift, while the Y-axis shows the ¹⁵N chemical shift of the purified ¹⁵N labeled polypeptide.

[0416] FIG. 395 shows the nucleic acid coding sequence (SEQ ID NO: 436) for GrpE protein, with gene designation of grpE, as predicted from the genomic sequence of S. aureus. This predicted nucleic acid coding sequence was cloned and sequenced to produce the polynucleotide sequence shown in FIG. 397.

[0417] FIG. 396 shows the amino acid sequence (SEQ ID NO: 437) for GrpE protein (grpE) from S. aureus, as predicted from the nucleotide sequence SEQ ID NO: 436 shown in FIG. 395.

[0418] FIG. 397 shows the experimentally determined nucleic acid coding sequence (SEQ ID NO: 438) for GrpE protein (grpE) from S. aureus, as described in EXAMPLE 1.

[0419] FIG. 398 shows the amino acid sequence (SEQ ID NO: 439) for GrpE protein (grpE) from S. aureus, as predicted from the experimentally determined nucleotide sequence SEQ ID NO: 438 shown in FIG. 397.

[0420] FIG. 399 shows the primer sequences used to amplify the nucleic acid of SEQ ID NO: 438. The primers are SEQ ID NO: 440 and SEQ ID NO: 441.

[0421] FIG. 400 contains TABLE 97, which provides among other things a variety of data and other information on GrpE protein (grpE) from S. aureus.

[0422] FIG. 401 contains TABLE 98, which provides the results of several bioinformatic analyses relating to GrpE protein (grpE) from S. aureus.

[0423] FIG. 402 shows the nucleic acid coding sequence (SEQ ID NO: 445) for transcription termination factor NusG, with gene designation of nusG, as predicted from the genomic sequence of H. pylori. This predicted nucleic acid coding sequence was cloned and sequenced to produce the polynucleotide sequence shown in FIG. 404.

[0424] FIG. 403 shows the amino acid sequence (SEQ ID NO: 446) for transcription termination factor NusG (nusG) from H. pylori, as predicted from the nucleotide sequence SEQ ID NO: 445 shown in FIG. 402.

[0425] FIG. 404 shows the experimentally determined nucleic acid coding sequence (SEQ ID NO: 447) for transcription termination factor NusG (nusG) from H. pylori, as described in EXAMPLE 1.

[0426] FIG. 405 shows the amino acid sequence (SEQ ID NO: 448) for transcription termination factor NusG (nusG) from H. pylori, as predicted from the experimentally determined nucleotide sequence SEQ ID NO: 447 shown in FIG. 404.

[0427] FIG. 406 shows the primer sequences used to amplify the nucleic acid of SEQ ID NO: 447. The primers are SEQ ID NO: 449 and SEQ ID NO: 450.

[0428] FIG. 407 contains TABLE 99, which provides among other things a variety of data and other information on transcription termination factor NusG (nusG) from H. pylori.

[0429] FIG. 408 contains TABLE 100, which provides the results of several bioinformatic analyses relating to transcription termination factor NusG (nusG) from H. pylori.

[0430] FIG. 409 shows the nucleic acid coding sequence (SEQ ID NO: 454) for transcription termination factor NusG, with gene designation of nusG, as predicted from the genomic sequence of S. pneumoniae. This predicted nucleic acid coding sequence was cloned and sequenced to produce the polynucleotide sequence shown in FIG. 411.

[0431] FIG. 410 shows the amino acid sequence (SEQ ID NO: 455) for transcription termination factor NusG (nusG) from S. pneumoniae, as predicted from the nucleotide sequence SEQ ID NO: 454 shown in FIG. 409.

[0432] FIG. 411 shows the experimentally determined nucleic acid coding sequence (SEQ ID NO: 456) for transcription termination factor NusG (nusG) from S. pneumoniae, as described in EXAMPLE 1.

[0433] FIG. 412 shows the amino acid sequence (SEQ ID NO: 457) for transcription termination factor NusG (nusG) from S. pneumoniae, as predicted from the experimentally determined nucleotide sequence SEQ ID NO: 456 shown in FIG. 411.

[0434] FIG. 413 shows the primer sequences used to amplify the nucleic acid of SEQ ID NO: 456. The primers are SEQ ID NO: 458 and SEQ ID NO: 459.

[0435] FIG. 414 contains TABLE 101, which provides among other things a variety of data and other information on transcription termination factor NusG (nusG) from S. pneumoniae.

[0436] FIG. 415 contains TABLE 102, which provides the results of several bioinformatic analyses relating to transcription termination factor NusG (nusG) from S. pneumoniae.

[0437] FIG. 416 depicts a ¹H, ¹⁵N Heteronuclear Single Quantum Coherence (HSQC) spectrum of transcription termination factor NusG (nusG) from S. pneumoniae, as described in EXAMPLE 15 below. The X-axis shows a proton chemical shift, while the Y-axis shows the ¹⁵N chemical shift of the purified ¹⁵N labeled polypeptide.

[0438] FIG. 417 shows the nucleic acid coding sequence (SEQ ID NO: 463) for DNA-directed RNA polymerase, alpha subunit, with gene designation of rpoA, as predicted from the genomic sequence of H. pylori. This predicted nucleic acid coding sequence was cloned and sequenced to produce the polynucleotide sequence shown in FIG. 419.

[0439] FIG. 418 shows the amino acid sequence (SEQ ID NO: 464) for DNA-directed RNA polymerase, alpha subunit (rpoA) from H. pylori, as predicted from the nucleotide sequence SEQ ID NO: 463 shown in FIG. 417.

[0440] FIG. 419 shows the experimentally determined nucleic acid coding sequence (SEQ ID NO: 465) for DNA-directed RNA polymerase, alpha subunit (rpoA) from H. pylori, as described in EXAMPLE 1.

[0441] FIG. 420 shows the amino acid sequence (SEQ ID NO: 466) for DNA-directed RNA polymerase, alpha subunit (rpoA) from H. pylori, as predicted from the experimentally determined nucleotide sequence SEQ ID NO: 465 shown in FIG. 419.

[0442] FIG. 421 shows the primer sequences used to amplify the nucleic acid of SEQ ID NO: 465. The primers are SEQ ID NO: 467 and SEQ ID NO: 468.

[0443] FIG. 422 contains TABLE 103, which provides among other things a variety of data and other information on DNA-directed RNA polymerase, alpha subunit (rpoA) from H. pylori.

[0444] FIG. 423 contains TABLE 104, which provides the results of several bioinformatic analyses relating to DNA-directed RNA polymerase, alpha subunit (rpoA) from H. pylori.

[0445] FIG. 424 shows the nucleic acid coding sequence (SEQ ID NO: 472) for DNA-directed RNA polymerase, alpha subunit, with gene designation of rpoA, as predicted from the genomic sequence of S. aureus. This predicted nucleic acid coding sequence was cloned and sequenced to produce the polynucleotide sequence shown in FIG. 426.

[0446] FIG. 425 shows the amino acid sequence (SEQ ID NO: 473) for DNA-directed RNA polymerase, alpha subunit (rpoA) from S. aureus, as predicted from the nucleotide sequence SEQ ID NO: 472 shown in FIG. 424.

[0447] FIG. 426 shows the experimentally determined nucleic acid coding sequence (SEQ ID NO: 474) for DNA-directed RNA polymerase, alpha subunit (rpoA) from S. aureus, as described in EXAMPLE 1.

[0448] FIG. 427 shows the amino acid sequence (SEQ ID NO: 475) for DNA-directed RNA polymerase, alpha subunit (rpoA) from S. aureus, as predicted from the experimentally determined nucleotide sequence SEQ ID NO: 474 shown in FIG. 426.

[0449] FIG. 428 shows the primer sequences used to amplify the nucleic acid of SEQ ID NO: 474. The primers are SEQ ID NO: 476 and SEQ ID NO: 477.

[0450] FIG. 429 contains TABLE 105, which provides among other things a variety of data and other information on DNA-directed RNA polymerase, alpha subunit (rpoA) from S. aureus.

[0451] FIG. 430 contains TABLE 106, which provides the results of several bioinformatic analyses relating to DNA-directed RNA polymerase, alpha subunit (rpoA) from S. aureus.

[0452] FIG. 431 shows the nucleic acid coding sequence (SEQ ID NO: 481) for prolyl-tRNA synthetase, with gene designation of proS, as predicted from the genomic sequence of H. pylori. This predicted nucleic acid coding sequence was cloned and sequenced to produce the polynucleotide sequence shown in FIG. 433.

[0453] FIG. 432 shows the amino acid sequence (SEQ ID NO: 482) for prolyl-tRNA synthetase (proS) from H. pylori, as predicted from the nucleotide sequence SEQ ID NO: 481 shown in FIG. 431.

[0454] FIG. 433 shows the experimentally determined nucleic acid coding sequence (SEQ ID NO: 483) for prolyl-tRNA synthetase (pros) from H. pylori, as described in EXAMPLE1.

[0455] FIG. 434 shows the amino acid sequence (SEQ ID NO: 484) for prolyl-tRNA synthetase (proS) from H. pylori, as predicted from the experimentally determined nucleotide sequence SEQ ID NO: 483 shown in FIG. 433.

[0456] FIG. 435 shows the primer sequences used to amplify the nucleic acid of SEQ ID NO: 483. The primers are SEQ ID NO: 485 and SEQ ID NO: 486.

[0457] FIG. 436 contains TABLE 107, which provides among other things a variety of data and other information on prolyl-tRNA synthetase (proS) from H. pylori.

[0458] FIG. 437 contains TABLE 108, which provides the results of several bioinformatic analyses relating to prolyl-tRNA synthetase (pros) from H. pylori.

[0459] FIG. 438 shows the nucleic acid coding sequence (SEQ ID NO: 490) for seryl-tRNA synthetase, with gene designation of serS, as predicted from the genomic sequence of S. pneumoniae. This predicted nucleic acid coding sequence was cloned and sequenced to produce the polynucleotide sequence shown in FIG. 440.

[0460] FIG. 439 shows the amino acid sequence (SEQ ID NO: 491) for seryl-tRNA synthetase (serS) from S. pneumoniae, as predicted from the nucleotide sequence SEQ ID NO: 490 shown in FIG. 438.

[0461] FIG. 440 shows the experimentally determined nucleic acid coding sequence (SEQ ID NO: 492) for seryl-tRNA synthetase (serS) from S. pneumoniae, as described in EXAMPLE 1.

[0462] FIG. 441 shows the amino acid sequence (SEQ ID NO: 493) for seryl-tRNA synthetase (serS) from S. pneumoniae, as predicted from the experimentally determined nucleotide sequence SEQ ID NO: 492 shown in FIG. 440.

[0463] FIG. 442 shows the primer sequences used to amplify the nucleic acid of SEQ ID NO: 492. The primers are SEQ ID NO: 494 and SEQ ID NO: 495.

[0464] FIG. 443 contains TABLE 109, which provides among other things a variety of data and other information on seryl-tRNA synthetase (serS) from S. pneumoniae.

[0465] FIG. 444 contains TABLE 110, which provides the results of several bioinformatic analyses relating to seryl-tRNA synthetase (serS) from S. pneumoniae.

[0466] FIG. 445 shows the nucleic acid coding sequence (SEQ ID NO: 499) for L-cysteine desulfurase, with gene designation of iscS, as predicted from the genomic sequence of P. aeruginosa. This predicted nucleic acid coding sequence was cloned and sequenced to produce the polynucleotide sequence shown in FIG. 447.

[0467] FIG. 446 shows the amino acid sequence (SEQ ID NO: 500) for L-cysteine desulfurase (iscS) from P. aeruginosa, as predicted from the nucleotide sequence SEQ ID NO: 499 shown in FIG. 445.

[0468] FIG. 447 shows the experimentally determined nucleic acid coding sequence (SEQ ID NO: 501) for L-cysteine desulfurase (iscS) from P. aeruginosa, as described in EXAMPLE 1.

[0469] FIG. 448 shows the amino acid sequence (SEQ ID NO: 502) for L-cysteine desulfurase (iscS) from P. aeruginosa, as predicted from the experimentally determined nucleotide sequence SEQ ID NO: 501 shown in FIG. 447.

[0470] FIG. 449 shows the primer sequences used to amplify the nucleic acid of SEQ ID NO: 501. The primers are SEQ ID NO: 503 and SEQ ID NO: 504.

[0471] FIG. 450 contains TABLE 111, which provides among other things a variety of data and other information on L-cysteine desulfurase (iscS) from P. aeruginosa.

[0472] FIG. 451 contains TABLE 112, which provides the results of several bioinformatic analyses relating to L-cysteine desulfurase (iscS) from P. aeruginosa.

[0473] FIG. 452 shows the nucleic acid coding sequence (SEQ ID NO: 508) for RhlR and LasR homologue, with gene designation of sdiA, as predicted from the genomic sequence of E. coli. This predicted nucleic acid coding sequence was cloned and sequenced to produce the polynucleotide sequence shown in FIG. 454.

[0474] FIG. 453 shows the amino acid sequence (SEQ ID NO: 509) for RhlR and LasR homologue (sdiA) from E. coli, as predicted from the nucleotide sequence SEQ ID NO: 508 shown in FIG. 452.

[0475] FIG. 454 shows the experimentally determined nucleic acid coding sequence (SEQ ID NO: 510) for RhlR and LasR homologue (sdiA) from E. coli, as described in EXAMPLE 1.

[0476] FIG. 455 shows the amino acid sequence (SEQ ID NO: 511) for RhlR and LasR homologue (sdiA) from E. coli, as predicted from the experimentally determined nucleotide sequence SEQ ID NO: 510 shown in FIG. 454.

[0477] FIG. 456 shows the primer sequences used to amplify the nucleic acid of SEQ ID NO: 510. The primers are SEQ ID NO: 512 and SEQ ID NO: 513.

[0478] FIG. 457 contains TABLE 113, which provides among other things a variety of data and other information on RhlR and LasR homologue (sdiA) from E. coli.

[0479] FIG. 458 contains TABLE 114, which provides the results of several bioinformatic analyses relating to RhlR and LasR homologue (sdiA) from E. coli.

[0480] FIG. 459 shows the nucleic acid coding sequence (SEQ ID NO: 517) for autoinducer synthesis protein RhlI, with gene designation of rhlI, as predicted from the genomic sequence of P. aeruginosa. This predicted nucleic acid coding sequence was cloned and sequenced to produce the polynucleotide sequence shown in FIG. 461.

[0481] FIG. 460 shows the amino acid sequence (SEQ ID NO: 518) for autoinducer synthesis protein RhlI (rhlI) from P. aeruginosa, as predicted from the nucleotide sequence SEQ ID NO: 517 shown in FIG. 459.

[0482] FIG. 461 shows the experimentally determined nucleic acid coding sequence (SEQ ID NO: 519) for autoinducer synthesis protein RhlI (rhlI) from P. aeruginosa, as described in EXAMPLE 1.

[0483] FIG. 462 shows the amino acid sequence (SEQ ID NO: 520) for autoinducer synthesis protein RhlI (rhlI) from P. aeruginosa, as predicted from the experimentally determined nucleotide sequence SEQ ID NO: 519 shown in FIG. 461.

[0484] FIG. 463 shows the primer sequences used to amplify the nucleic acid of SEQ ID NO: 519. The primers are SEQ ID NO: 521 and SEQ ID NO: 522.

[0485] FIG. 464 contains TABLE 115, which provides among other things a variety of data and other information on autoinducer synthesis protein RhlI (rhlI) from P. aeruginosa.

[0486] FIG. 465 contains TABLE 116, which provides the results of several bioinformatic analyses relating to autoinducer synthesis protein RhlI (rhlI) from P. aeruginosa.

[0487] FIG. 466 shows the nucleic acid coding sequence (SEQ ID NO: 526) for autoinducer synthesis protein LasI, with gene designation of lasI, as predicted from the genomic sequence of P. aeruginosa. This predicted nucleic acid coding sequence was cloned and sequenced to produce the polynucleotide sequence shown in FIG. 468.

[0488] FIG. 467 shows the amino acid sequence (SEQ ID NO: 527) for autoinducer synthesis protein LasI (lasI) from P. aeruginosa, as predicted from the nucleotide sequence SEQ ID NO: 526 shown in FIG. 466.

[0489] FIG. 468 shows the experimentally determined nucleic acid coding sequence (SEQ ID NO: 528) for autoinducer synthesis protein LasI (lasI) from P. aeruginosa, as described in EXAMPLE 1.

[0490] FIG. 469 shows the amino acid sequence (SEQ ID NO: 529) for autoinducer synthesis protein LasI (lasI) from P. aeruginosa, as predicted from the experimentally determined nucleotide sequence SEQ ID NO: 528 shown in FIG. 468.

[0491] FIG. 470 shows the primer sequences used to amplify the nucleic acid of SEQ ID NO: 528. The primers are SEQ ID NO: 530 and SEQ ID NO: 531.

[0492] FIG. 471 contains TABLE 117, which provides among other things a variety of data and other information on autoinducer synthesis protein LasI (lasI) from P. aeruginosa.

[0493] FIG. 472 contains TABLE 118, which provides the results of several bioinformatic analyses relating to autoinducer synthesis protein LasI (lasI) from P. aeruginosa.

[0494] FIG. 473 shows the nucleic acid coding sequence (SEQ ID NO: 535) for adenylate kinase, with gene designation of adk, as predicted from the genomic sequence of S. aureus. This predicted nucleic acid coding sequence was cloned and sequenced to produce the polynucleotide sequence shown in FIG. 475.

[0495] FIG. 474 shows the amino acid sequence (SEQ ID NO: 536) for adenylate kinase (adk) from S. aureus, as predicted from the nucleotide sequence SEQ ID NO: 535 shown in FIG. 473.

[0496] FIG. 475 shows the experimentally determined nucleic acid coding sequence (SEQ ID NO: 537) for adenylate kinase (adk) from S. aureus, as described in EXAMPLE 1.

[0497] FIG. 476 shows the amino acid sequence (SEQ ID NO: 538) for adenylate kinase (adk) from S. aureus, as predicted from the experimentally determined nucleotide sequence SEQ ID NO: 537 shown in FIG. 475.

[0498] FIG. 477 shows the primer sequences used to amplify the nucleic acid of SEQ ID NO: 537. The primers are SEQ ID NO: 539 and SEQ ID NO: 540.

[0499] FIG. 478 contains TABLE 119, which provides among other things a variety of data and other information on adenylate kinase (adk) from S. aureus.

[0500] FIG. 479 contains TABLE 120, which provides the results of several bioinformatic analyses relating to adenylate kinase (adk) from S. aureus.

[0501] FIG. 480 shows the nucleic acid coding sequence (SEQ ID NO: 544) for UDP-N-acetylglucosamine pyrophosphorylase (glmU), with gene designation of glmU, as predicted from the genomic sequence of H. pylori. This predicted nucleic acid coding sequence was cloned and sequenced to produce the polynucleotide sequence shown in FIG. 482.

[0502] FIG. 481 shows the amino acid sequence (SEQ ID NO: 545) for UDP-N-acetylglucosamine pyrophosphorylase (glmU) (glmU) from H. pylori, as predicted from the nucleotide sequence SEQ ID NO: 544 shown in FIG. 480.

[0503] FIG. 482 shows the experimentally determined nucleic acid coding sequence (SEQ ID NO: 546) for UDP-N-acetylglucosamine pyrophosphorylase (glmU) (glmU) from H. pylori, as described in EXAMPLE 1.

[0504] FIG. 483 shows the amino acid sequence (SEQ ID NO: 547) for UDP-N-acetylglucosamine pyrophosphorylase (glmU) (glinU) from H. pylori, as predicted from the experimentally determined nucleotide sequence SEQ ID NO: 546 shown in FIG. 482.

[0505] FIG. 484 shows the primer sequences used to amplify the nucleic acid of SEQ ID NO: 546. The primers are SEQ ID NO: 548 and SEQ ID NO: 549.

[0506] FIG. 485 contains TABLE 121, which provides among other things a variety of data and other information on UDP-N-acetylglucosamine pyrophosphorylase (glmU) (glmU) from H. pylori.

[0507] FIG. 486 contains TABLE 122, which provides the results of several bioinformatic analyses relating to UDP-N-acetylglucosamine pyrophosphorylase (glmU) (glmU) from H. pylori.

[0508] FIG. 487 shows the nucleic acid coding sequence (SEQ ID NO: 553) for geranyltranstransferase (farnesyldiphosphate synthase), with gene designation of ispA, as predicted from the genomic sequence of E. coli. This predicted nucleic acid coding sequence was cloned and sequenced to produce the polynucleotide sequence shown in FIG. 489.

[0509] FIG. 488 shows the amino acid sequence (SEQ ID NO: 554) for geranyltranstransferase (famesyldiphosphate synthase) (ispA) from E. coli, as predicted from the nucleotide sequence SEQ ID NO: 553 shown in FIG. 487.

[0510] FIG. 489 shows the experimentally determined nucleic acid coding sequence (SEQ ID NO: 555) for geranyltranstransferase (farnesyldiphosphate synthase) (ispA) from E. coli, as described in EXAMPLE 1.

[0511] FIG. 490 shows the amino acid sequence (SEQ ID NO: 556) for geranyltranstransferase (farnesyldiphosphate synthase) (ispA) from E. coli, as predicted from the experimentally determined nucleotide sequence SEQ ID NO: 555 shown in FIG. 489.

[0512] FIG. 491 shows the primer sequences used to amplify the nucleic acid of SEQ ID NO: 555. The primers are SEQ ID NO: 557 and SEQ ID NO: 558.

[0513] FIG. 492 contains TABLE 123, which provides among other things a variety of data and other information on geranyltranstransferase (farnesyldiphosphate synthase) (ispA) from E. coli.

[0514] FIG. 493 contains TABLE 124, which provides the results of several bioinformatic analyses relating to geranyltranstransferase (farnesyldiphosphate synthase) (ispA) from E. coli.

[0515] FIG. 494 shows the nucleic acid coding sequence (SEQ ID NO: 562) for enoyl-(acyl-carrier-protein) reductase (NADH), with gene designation of fabI, as predicted from the genomic sequence of H. pylori. This predicted nucleic acid coding sequence was cloned and sequenced to produce the polynucleotide sequence shown in FIG. 496.

[0516] FIG. 495 shows the amino acid sequence (SEQ ID NO: 563) for enoyl-(acyl-carrier-protein) reductase (NADH) (fabI) from H. pylori, as predicted from the nucleotide sequence SEQ ID NO: 562 shown in FIG. 494.

[0517] FIG. 496 shows the experimentally determined nucleic acid coding sequence (SEQ ID NO: 564) for enoyl-(acyl-carrier-protein) reductase (NADH) (fabI) from H. pylori, as described in EXAMPLE 1.

[0518] FIG. 497 shows the amino acid sequence (SEQ ID NO: 565) for enoyl-(acyl-carrier-protein) reductase (NADH) (fabI) from H. pylori, as predicted from the experimentally determined nucleotide sequence SEQ ID NO: 564 shown in FIG. 496.

[0519] FIG. 498 shows the primer sequences used to amplify the nucleic acid of SEQ ID NO: 564. The primers are SEQ ID NO: 566 and SEQ ID NO: 567.

[0520] FIG. 499 contains TABLE 125, which provides among other things a variety of data and other information on enoyl-(acyl-carrier-protein) reductase (NADH) (fabI) from H. pylori.

[0521] FIG. 500 contains TABLE 126, which provides the results of several bioinformatic analyses relating to enoyl-(acyl-carrier-protein) reductase (NADH) (fabI) from H. pylori.

[0522] FIG. 501 shows the nucleic acid coding sequence (SEQ ID NO: 571) for ribonucleoside diphosphate reductase, beta subunit, with gene designation of nrdB, as predicted from the genomic sequence of H. pylori. This predicted nucleic acid coding sequence was cloned and sequenced to produce the polynucleotide sequence shown in FIG. 503.

[0523] FIG. 502 shows the amino acid sequence (SEQ ID NO: 572) for ribonucleoside diphosphate reductase, beta subunit (nrdB) from H. pylori, as predicted from the nucleotide sequence SEQ ID NO: 571 shown in FIG. 501.

[0524] FIG. 503 shows the experimentally determined nucleic acid coding sequence (SEQ ID NO: 573) for ribonucleoside diphosphate reductase, beta subunit (nrdB) from H. pylori, as described in EXAMPLE 1.

[0525] FIG. 504 shows the amino acid sequence (SEQ ID NO: 574) for ribonucleoside diphosphate reductase, beta subunit (nrdB) from H. pylori, as predicted from the experimentally determined nucleotide sequence SEQ ID NO: 573 shown in FIG. 503.

[0526] FIG. 505 shows the primer sequences used to amplify the nucleic acid of SEQ ID NO: 573. The primers are SEQ ID NO: 575 and SEQ ID NO: 576.

[0527] FIG. 506 contains TABLE 127, which provides among other things a variety of data and other information on ribonucleoside diphosphate reductase, beta subunit (nrdB) from H. pylori.

[0528] FIG. 507 contains TABLE 128, which provides the results of several bioinformatic analyses relating to ribonucleoside diphosphate reductase, beta subunit (nrdB) from H. pylori.

### DETAILED DESCRIPTION OF THE INVENTION

### 1. Definitions

[0529] For convenience, certain terms employed in the specification, examples, and appended claims are collected here. Unless defined otherwise, all technical and scientific terms used herein have the same meaning as commonly understood by one of ordinary skill in the art to which this invention belongs.

[0530] The articles “a” and “an” are used herein to refer to one or to more than one (i.e., to at least one) of the grammatical object of the article. By way of example, “an element” means one element or more than one element.

[0531] The term “amino acid” is intended to embrace all molecules, whether natural or synthetic, which include both an amino functionality and an acid functionality and capable of being included in a polymer of naturally-occurring amino acids. Exemplary amino acids include naturally-occurring amino acids; analogs, derivatives and congeners thereof; amino acid analogs having variant side chains; and all stereoisomers of any of any of the foregoing.

[0532] The term “binding” refers to an association, which may be a stable association, between two molecules, e.g., between a polypeptide of the invention and a binding partner, due to, for example, electrostatic, hydrophobic, ionic and/or hydrogen-bond interactions under physiological conditions.

[0533] A “comparison window,” as used herein, refers to a conceptual segment of at least 20 contiguous amino acid positions wherein a protein sequence may be compared to a reference sequence of at least 20 contiguous amino acids and wherein the portion of the protein sequence in the comparison window may comprise additions or deletions (i.e., gaps) of 20 percent or less as compared to the reference sequence (which does not comprise additions or deletions) for optimal alignment of the two sequences. Optimal alignment of sequences for aligning a comparison window may be conducted by the local homology algorithm of Smith and Waterman (1981) Adv. Appl. Math. 2: 482, by the homology alignment algorithm of Needleman and Wunsch (1970) J. Mol. Biol. 48: 443, by the search for similarity method of Pearson and Lipman (1988) Proc. Natl. Acad. Sci. (U.S.A.) 85: 2444, by computerized implementations of these algorithms (GAP, BESTFIT, FASTA, and TFASTA in the Wisconsin Genetics Software Package Release 7.0, Genetics Computer Group, 575 Science Dr., Madison, Wis.), or by inspection, and the best alignment (i.e., resulting in the highest percentage of homology over the comparison window) generated by the various methods may be identified.

[0534] The term “complex” refers to an association between at least two moieties (e.g. chemical or biochemical) that have an affinity for one another. Examples of complexes include associations between antigen/antibodies, lectin/avidin, target polynucleotide/probe oligonucleotide, antibody/anti-antibody, receptor/ligand, enzyme/ligand, polypeptide/polypeptide, polypeptide/polynucleotide, polypeptide/co-factor, polypeptide/substrate, polypeptide/inhibitor, polypeptide/small molecule, and the like. “Member of a complex” refers to one moiety of the complex, such as an antigen or ligand. “Protein complex” or “polypeptide complex” refers to a complex comprising at least one polypeptide.

[0535] The term “conserved residue” refers to an amino acid that is a member of a group of amino acids having certain common properties. The term “conservative amino acid substitution” refers to the substitution (conceptually or otherwise) of an amino acid from one such group with a different amino acid from the same group. A functional way to define common properties between individual amino acids is to analyze the normalized frequencies of amino acid changes between corresponding proteins of homologous organisms (Schulz, G. E. and R. H. Schirmer, Principles of Protein Structure, Springer-Verlag). According to such analyses, groups of amino acids may be defined where amino acids within a group exchange preferentially with each other, and therefore resemble each other most in their impact on the overall protein structure (Schulz, G. E. and R. H. Schirmer, Principles of Protein Structure, Springer-Verlag). One example of a set of amino acid groups defined in this manner include: (i) a charged group, consisting of Glu and Asp, Lys, Arg and His, (ii) a positively-charged group, consisting of Lys, Arg and His, (iii) a negatively-charged group, consisting of Glu and Asp, (iv) an aromatic group, consisting of Phe, Tyr and Trp, (v) a nitrogen ring group, consisting of His and Trp, (vi) a large aliphatic nonpolar group, consisting of Val, Leu and Ile, (vii) a slightly-polar group, consisting of Met and Cys, (viii) a small-residue group, consisting of Ser, Thr, Asp, Asn, Gly, Ala, Glu, Gln and Pro, (ix) an aliphatic group consisting of Val, Leu, Ile, Met and Cys, and (x) a small hydroxyl group consisting of Ser and Thr.

[0536] The term “domain”, when used in connection with a polypeptide, refers to a specific region within such polypeptide that comprises a particular structure or mediates a particular function. In the typical case, a domain of a polypeptide of the invention is a fragment of the polypeptide. In certain instances, a domain is a structurally stable domain, as evidenced, for example, by mass spectroscopy, or by the fact that a modulator may bind to a druggable region of the domain.

[0537] The term “druggable region”, when used in reference to a polypeptide, nucleic acid, complex and the like, refers to a region of the molecule which is a target or is a likely target for binding a modulator. For a polypeptide, a druggable region generally refers to a region wherein several amino acids of a polypeptide would be capable of interacting with a modulator or other molecule. For a polypeptide or complex thereof, exemplary druggable regions including binding pockets and sites, enzymatic active sites, interfaces between domains of a polypeptide or complex, surface grooves or contours or surfaces of a polypeptide or complex which are capable of participating in interactions with another molecule. In certain instances, the interacting molecule is another polypeptide, which may be naturally-occurring. In other instances, the druggable region is on the surface of the molecule.

[0538] Druggable regions may be described and characterized in a number of ways. For example, a druggable region may be characterized by some or all of the amino acids that make up the region, or the backbone atoms thereof, or the side chain atoms thereof (optionally with or without the Cax atoms). Alternatively, in certain instances, the volume of a druggable region corresponds to that of a carbon based molecule of at least about 200 amu and often up to about 800 amu. In other instances, it will be appreciated that the volume of such region may correspond to a molecule of at least about 600 amu and often up to about 1600 amu or more.

[0539] Alternatively, a druggable region may be characterized by comparison to other regions on the same or other molecules. For example, the term “affinity region” refers to a druggable region on a molecule (such as a polypeptide of the invention) that is present in several other molecules, in so much as the structures of the same affinity regions are sufficiently the same so that they are expected to bind the same or related structural analogs. An example of an affinity region is an ATP-binding site of a protein kinase that is found in several protein kinases (whether or not of the same origin). The term “selectivity region” refers to a druggable region of a molecule that may not be found on other molecules, in so much as the structures of different selectivity regions are sufficiently different so that they are not expected to bind the same or related structural analogs. An exemplary selectivity region is a catalytic domain of a protein kinase that exhibits specificity for one substrate. In certain instances, a single modulator may bind to the same affinity region across a number of proteins that have a substantially similar biological function, whereas the same modulator may bind to only one selectivity region of one of those proteins.

[0540] Continuing with examples of different druggable regions, the term “undesired region” refers to a druggable region of a molecule that upon interacting with another molecule results in an undesirable affect. For example, a binding site that oxidizes the interacting molecule (such as P-450 activity) and thereby results in increased toxicity for the oxidized molecule may be deemed a “undesired region”. Other examples of potential undesired regions includes regions that upon interaction with a drug decrease the membrane permeability of the drug, increase the excretion of the drug, or increase the blood brain transport of the drug. It may be the case that, in certain circumstances, an undesired region will no longer be deemed an undesired region because the affect of the region will be favorable, e.g., a drug intended to treat a brain condition would benefit from interacting with a region that resulted in increased blood brain transport, whereas the same region could be deemed undesirable for drugs that were not intended to be delivered to the brain.

[0541] When used in reference to a druggable region, the “selectivity” or “specificity” of a molecule such as a modulator to a druggable region may be used to describe the binding between the molecule and a druggable region. For example, the selectivity of a modulator with respect to a druggable region may be expressed by comparison to another modulator, using the respective values of Kd (i.e., the dissociation constants for each modulator-druggable region complex) or, in cases where a biological effect is observed below the Kd, the ratio of the respective EC50's (i.e., the concentrations that produce 50% of the maximum response for the modulator interacting with each druggable region).

[0542] A “fusion protein” or “fusion polypeptide” refers to a chimeric protein as that term is known in the art and may be constructed using methods known in the art. In many examples of fusion proteins, there are two different polypeptide sequences, and in certain cases, there may be more. The sequences may be linked in frame. A fusion protein may include a domain which is found (albeit in a different protein) in an organism which also expresses the first protein, or it may be an “interspecies”, “intergenic”, etc. fusion expressed by different kinds of organisms. In various embodiments, the fusion polypeptide may comprise one or more amino acid sequences linked to a first polypeptide. In the case where more than one amino acid sequence is fused to a first polypeptide, the fusion sequences may be multiple copies of the same sequence, or alternatively, may be different amino acid sequences. The fusion polypeptides may be fused to the N-terminus, the C-terminus, or the N- and C-terminus of the first polypeptide. Exemplary fusion proteins include polypeptides comprising a glutathione S-transferase tag (GST-tag), histidine tag (His-tag), an immunoglobulin domain or an immunoglobulin binding domain.

[0543] The term “gene” refers to a nucleic acid comprising an open reading frame encoding a polypeptide having exon sequences and optionally intron sequences. The term “intron” refers to a DNA sequence present in a given gene which is not translated into protein and is generally found between exons.

[0544] The term “having substantially similar biological activity”, when used in reference to two polypeptides, refers to a biological activity of a first polypeptide which is substantially similar to at least one of the biological activities of a second polypeptide. A substantially similar biological activity means that the polypeptides carry out a similar function, e.g., a similar enzymatic reaction or a similar physiological process, etc. For example, two homologous proteins may have a substantially similar biological activity if they are involved in a similar enzymatic reaction, e.g., they are both kinases which catalyze phosphorylation of a substrate polypeptide, however, they may phosphorylate different regions on the same protein substrate or different substrate proteins altogether. Alternatively, two homologous proteins may also have a substantially similar biological activity if they are both involved in a similar physiological process, e.g., transcription. For example, two proteins may be transcription factors, however, they may bind to different DNA sequences or bind to different polypeptide interactors. Substantially similar biological activities may also be associated with proteins carrying out a similar structural role, for example, two membrane proteins.

[0545] The term “isolated polypeptide” refers to a polypeptide, in certain embodiments prepared from recombinant DNA or RNA, or of synthetic origin, or some combination thereof, which (1) is not associated with proteins that it is normally found with in nature, (2) is isolated from the cell in which it normally occurs, (3) is isolated free of other proteins from the same cellular source, (4) is expressed by a cell from a different species, or (5) does not occur in nature.

[0546] The term “isolated nucleic acid” refers to a polynucleotide of genomic, cDNA, or synthetic origin or some combination there of, which (1) is not associated with the cell in which the “isolated nucleic acid” is found in nature, or (2) is operably linked to a polynucleotide to which it is not linked in nature.

[0547] The terms “label” or “labeled” refer to incorporation or attachment, optionally covalently or non-covalently, of a detectable marker into a molecule, such as a polypeptide. Various methods of labeling polypeptides are known in the art and may be used. Examples of labels for polypeptides include, but are not limited to, the following: radioisotopes, fluorescent labels, heavy atoms, enzymatic labels or reporter genes, chemiluminescent groups, biotinyl groups, predetermined polypeptide epitopes recognized by a secondary reporter (e.g., leucine zipper pair sequences, binding sites for secondary antibodies, metal binding domains, epitope tags). Examples and use of such labels are described in more detail below. In some embodiments, labels are attached by spacer arms of various lengths to reduce potential steric hindrance.

[0548] The term “mammal” is known in the art, and exemplary mammals include humans, primates, bovines, porcines, canines, felines, and rodents (e.g., mice and rats).

[0549] The term “modulation”, when used in reference to a functional property or biological activity or process (e.g., enzyme activity or receptor binding), refers to the capacity to either up regulate (e.g., activate or stimulate), down regulate (e.g., inhibit or suppress) or otherwise change a quality of such property, activity or process. In certain instances, such regulation may be contingent on the occurrence of a specific event, such as activation of a signal transduction pathway, and/or may be manifest only in particular cell types.

[0550] The term “modulator” refers to a polypeptide, nucleic acid, macromolecule, complex, molecule, small molecule, compound, species or the like (naturally-occurring or non-naturally-occurring), or an extract made from biological materials such as bacteria, plants, fungi, or animal cells or tissues, that may be capable of causing modulation. Modulators may be evaluated for potential activity as inhibitors or activators (directly or indirectly) of a functional property, biological activity or process, or combination of them, (e.g., agonist, partial antagonist, partial agonist, inverse agonist, antagonist, anti-microbial agents, inhibitors of microbial infection or proliferation, and the like) by inclusion in assays. In such assays, many modulators may be screened at one time. The activity of a modulator may be known, unknown or partially known.

[0551] The term “motif” refers to an amino acid sequence that is commonly found in a protein of a particular structure or function. Typically, a consensus sequence is defined to represent a particular motif. The consensus sequence need not be strictly defined and may contain positions of variability, degeneracy, variability of length, etc. The consensus sequence may be used to search a database to identify other proteins that may have a similar structure or function due to the presence of the motif in its amino acid sequence. For example, on-line databases may be searched with a consensus sequence in order to identify other proteins containing a particular motif. Various search algorithms and/or programs may be used, including FASTA, BLAST or ENTREZ. FASTA and BLAST are available as a part of the GCG sequence analysis package (University of Wisconsin, Madison, Wis.). ENTREZ is available through the National Center for Biotechnology Information, National Library of Medicine, National Institutes of Health, Bethesda, Md.

[0552] The term “naturally-occurring”, as applied to an object, refers to the fact that an object may be found in nature. For example, a polypeptide or polynucleotide sequence that is present in an organism (including bacteria) that may be isolated from a source in nature and which has not been intentionally modified by man in the laboratory is naturally-occurring.

[0553] The term “nucleic acid” refers to a polymeric form of nucleotides, either ribonucleotides or deoxynucleotides or a modified form of either type of nucleotide. The terms should also be understood to include, as equivalents, analogs of either RNA or DNA made from nucleotide analogs, and, as applicable to the embodiment being described, single-stranded (such as sense or antisense) and double-stranded polynucleotides.

[0554] The term “nucleic acid of the invention” refers to a nucleic acid encoding a polypeptide of the invention, e.g., a nucleic acid comprising a sequence consisting of, or consisting essentially of, a subject nucleic acid sequence. A nucleic acid of the invention may comprise all, or a portion of, a subject nucleic acid sequence; a nucleotide sequence at least 60%, 70%, 80%, 90%, 95%, 96%, 97%, 98% or 99% identical to a subject nucleic acid sequence; a nucleotide sequence that hybridizes under stringent conditions to a subject nucleic acid sequence; nucleotide sequences encoding polypeptides that are functionally equivalent to polypeptides of the invention; nucleotide sequences encoding polypeptides at least about 60%, 70%, 80%, 85%, 90%, 95%, 98%, 99% homologous or identical with a subject amino acid sequence; nucleotide sequences encoding polypeptides having an activity of a polypeptide of the invention and having at least about 60%, 70%, 80%, 85%, 90%, 95%, 98%, 99% or more homology or identity with a subject amino acid sequence; nucleotide sequences that differ by 1 to about 2, 3, 5, 7, 10, 15, 20, 30, 50, 75 or more nucleotide substitutions, additions or deletions, such as allelic variants, of a subject nucleic acid sequence; nucleic acids derived from and evolutionarily related to a subject nucleic acid sequence; and complements of, and nucleotide sequences resulting from the degeneracy of the genetic code, for all of the foregoing and other nucleic acids of the invention. Nucleic acids of the invention also include homologs, e.g., orthologs and paralogs, of a subject nucleic acid sequence and also variants of a subject nucleic acid sequence which have been codon optimized for expression in a particular organism (e.g., host cell).

[0555] The term “operably linked”, when describing the relationship between two nucleic acid regions, refers to a juxtaposition wherein the regions are in a relationship permitting them to function in their intended manner. For example, a control sequence “operably linked” to a coding sequence is ligated in such a way that expression of the coding sequence is achieved under conditions compatible with the control sequences, such as when the appropriate molecules (e.g., inducers and polymerases) are bound to the control or regulatory sequence(s).

[0556] The term “phenotype” refers to the entire physical, biochemical, and physiological makeup of a cell, e.g., having any one trait or any group of traits.

[0557] The term “polypeptide”, and the terms “protein” and “peptide” which are used interchangeably herein, refers to a polymer of amino acids. Exemplary polypeptides include gene products, naturally-occurring proteins, homologs, orthologs, paralogs, fragments, and other equivalents, variants and analogs of the foregoing.

[0558] The terms “polypeptide fragment” or “fragment”, when used in reference to a reference polypeptide, refers to a polypeptide in which amino acid residues are deleted as compared to the reference polypeptide itself, but where the remaining amino acid sequence is usually identical to the corresponding positions in the reference polypeptide. Such deletions may occur at the amino-terminus or carboxy-terminus of the reference polypeptide, or alternatively both. Fragments typically are at least 5, 6, 8 or 10 amino acids long, at least 14 amino acids long, at least 20, 30, 40 or 50 amino acids long, at least 75 amino acids long, or at least 100, 150, 200, 300, 500 or more amino acids long. A fragment can retain one or more of the biological activities of the reference polypeptide. In certain embodiments, a fragment may comprise a druggable region, and optionally additional amino acids on one or both sides of the druggable region, which additional amino acids may number from 5, 10, 15, 20, 30, 40, 50, or up to 100 or more residues. Further, fragments can include a sub-fragment of a specific region, which sub-fragment retains a function of the region from which it is derived. In another embodiment, a fragment may have immunogenic properties.

[0559] The term “polypeptide of the invention” refers to a polypeptide comprising a subject amino acid sequence, or an equivalent or fragment thereof, e.g., a polypeptide comprising a sequence consisting of, or consisting essentially of, a subject amino acid sequence. Polypeptides of the invention include polypeptides comprising all or a portion of a subject amino acid sequence; a subject amino acid sequence with 1 to about 2, 3, 5, 7, 10, 15, 20, 30, 50, 75 or more conservative amino acid substitutions; an amino acid sequence that is at least 60%, 70%, 80%, 90%, 95%, 96%, 97%, 98%, or 99% identical to a subject amino acid sequence; and functional fragments thereof. Polypeptides of the invention also include homologs, e.g., orthologs and paralogs, of a subject amino acid sequence.

[0560] The term “purified” refers to an object species that is the predominant species present (i.e., on a molar basis it is more abundant than any other individual species in the composition). A “purified fraction” is a composition wherein the object species comprises at least about 50 percent (on a molar basis) of all species present. In making the determination of the purity of a species in solution or dispersion, the solvent or matrix in which the species is dissolved or dispersed is usually not included in such determination; instead, only the species (including the one of interest) dissolved or dispersed are taken into account. Generally, a purified composition will have one species that comprises more than about 80 percent of all species present in the composition, more than about 85%, 90%, 95%, 99% or more of all species present. The object species may be purified to essential homogeneity (contaminant species cannot be detected in the composition by conventional detection methods) wherein the composition consists essentially of a single species. A skilled artisan may purify a polypeptide of the invention using standard techniques for protein purification in light of the teachings herein. Purity of a polypeptide may be determined by a number of methods known to those of skill in the art, including for example, amino-terminal amino acid sequence analysis, gel electrophoresis, mass-spectrometry analysis and the methods described in the Exemplification section herein.

[0561] The terms “recombinant protein” or “recombinant polypeptide” refer to a polypeptide which is produced by recombinant DNA techniques. An example of such techniques includes the case when DNA encoding the expressed protein is inserted into a suitable expression vector which is in turn used to transform a host cell to produce the protein or polypeptide encoded by the DNA.

[0562] A “reference sequence” is a defined sequence used as a basis for a sequence comparison; a reference sequence may be a subset of a larger sequence, for example, as a segment of a full-length protein given in a sequence listing such as a subject amino acid sequence, or may comprise a complete protein sequence. Generally, a reference sequence is at least 200, 300 or 400 nucleotides in length, frequently at least 600 nucleotides in length, and often at least 800 nucleotides in length (or the protein equivalent if it is shorter or longer in length). Because two proteins may each (1) comprise a sequence (i.e., a portion of the complete protein sequence) that is similar between the two proteins, and (2) may further comprise a sequence that is divergent between the two proteins, sequence comparisons between two (or more) proteins are typically performed by comparing sequences of the two proteins over a “comparison window” to identify and compare local regions of sequence similarity.

[0563] The term “regulatory sequence” is a generic term used throughout the specification to refer to polynucleotide sequences, such as initiation signals, enhancers, regulators and promoters, that are necessary or desirable to affect the expression of coding and non-coding sequences to which they are operably linked. Exemplary regulatory sequences are described in Goeddel; Gene Expression Technology: Methods in Enzymology, Academic Press, San Diego, Calif. (1990), and include, for example, the early and late promoters of SV40, adenovirus or cytomegalovirus immediate early promoter, the lac system, the trp system, the TAC or TRC system, T7 promoter whose expression is directed by T7 RNA polymerase, the major operator and promoter regions of phage lambda, the control regions for fd coat protein, the promoter for 3-phosphoglycerate kinase or other glycolytic enzymes, the promoters of acid phosphatase, e.g., Pho5, the promoters of the yeast α-mating factors, the polyhedron promoter of the baculovirus system and other sequences known to control the expression of genes of prokaryotic or eukaryotic cells or their viruses, and various combinations thereof. The nature and use of such control sequences may differ depending upon the host organism. In prokaryotes, such regulatory sequences generally include promoter, ribosomal binding site, and transcription termination sequences. The term “regulatory sequence” is intended to include, at a minimum, components whose presence may influence expression, and may also include additional components whose presence is advantageous, for example, leader sequences and fusion partner sequences. In certain embodiments, transcription of a polynucleotide sequence is under the control of a promoter sequence (or other regulatory sequence) which controls the expression of the polynucleotide in a cell-type in which expression is intended. It will also be understood that the polynucleotide can be under the control of regulatory sequences which are the same or different from those sequences which control expression of the naturally-occurring form of the polynucleotide.

[0564] The term “reporter gene” refers to a nucleic acid comprising a nucleotide sequence encoding a protein that is readily detectable either by its presence or activity, including, but not limited to, luciferase, fluorescent protein (e.g., green fluorescent protein), chloramphenicol acetyl transferase, β-galactosidase, secreted placental alkaline phosphatase, β-lactamase, human growth hormone, and other secreted enzyme reporters. Generally, a reporter gene encodes a polypeptide not otherwise produced by the host cell, which is detectable by analysis of the cell(s), e.g., by the direct fluorometric, radioisotopic or spectrophotometric analysis of the cell(s) and preferably without the need to kill the cells for signal analysis. In certain instances, a reporter gene encodes an enzyme, which produces a change in fluorometric properties of the host cell, which is detectable by qualitative, quantitative or semiquantitative function or transcriptional activation. Exemplary enzymes include esterases, β-lactamase, phosphatases, peroxidases, proteases (tissue plasminogen activator or urokinase) and other enzymes whose function may be detected by appropriate chromogenic or fluorogenic substrates known to those skilled in the art or developed in the future.

[0565] The term “sequence homology” refers to the proportion of base matches between two nucleic acid sequences or the proportion of amino acid matches between two amino acid sequences. When sequence homology is expressed as a percentage, e.g., 50%, the percentage denotes the proportion of matches over the length of sequence from a desired sequence (e.g., SEQ. ID NO: 1) that is compared to some other sequence. Gaps (in either of the two sequences) are permitted to maximize matching; gap lengths of 15 bases or less are usually used, 6 bases or less are used more frequently, with 2 bases or less used even more frequently. The term “sequence identity” means that sequences are identical (i.e., on a nucleotide-by-nucleotide basis for nucleic acids or amino acid-by-amino acid basis for polypeptides) over a window of comparison. The term “percentage of sequence identity” is calculated by comparing two optimally aligned sequences over the comparison window, determining the number of positions at which the identical amino acids occurs in both sequences to yield the number of matched positions, dividing the number of matched positions by the total number of positions in the comparison window, and multiplying the result by 100 to yield the percentage of sequence identity. Methods to calculate sequence identity are known to those of skill in the art and described in further detail below.

[0566] The term “small molecule” refers to a compound, which has a molecular weight of less than about 5 kD, less than about 2.5 kD, less than about 1.5 kD, or less than about 0.9 kD. Small molecules may be, for example, nucleic acids, peptides, polypeptides, peptide nucleic acids, peptidomimetics, carbohydrates, lipids or other organic (carbon containing) or inorganic molecules. Many pharmaceutical companies have extensive libraries of chemical and/or biological mixtures, often fungal, bacterial, or algal extracts, which can be screened with any of the assays of the invention. The term “small organic molecule” refers to a small molecule that is often identified as being an organic or medicinal compound, and does not include molecules that are exclusively nucleic acids, peptides or polypeptides.

[0567] The term “soluble” as used herein with reference to a polypeptide of the invention or other protein, means that upon expression in cell culture, at least some portion of the polypeptide or protein expressed remains in the cytoplasmic fraction of the cell and does not fractionate with the cellular debris upon lysis and centrifugation of the lysate. Solubility of a polypeptide may be increased by a variety of art recognized methods, including fusion to a heterologous amino acid sequence, deletion of amino acid residues, amino acid substitution (e.g., enriching the sequence with amino acid residues having hydrophilic side chains), and chemical modification (e.g., addition of hydrophilic groups). The solubility of polypeptides may be measured using a variety of art recognized techniques, including, dynamic light scattering to determine aggregation state, UV absorption, centrifugation to separate aggregated from non-aggregated material, and SDS gel electrophoresis (e.g., the amount of protein in the soluble fraction is compared to the amount of protein in the soluble and insoluble fractions combined). When expressed in a host cell, the polypeptides of the invention may be at least about 1%, 2%, 5%, 10%, 20%, 30%, 40%, 50%, 60%, 70%, 80%, 90% or more soluble, e.g., at least about 1%, 2%, 5%, 10%, 20%, 30%, 40%, 50%, 60%, 70%, 80%, 90% or more of the total amount of protein expressed in the cell is found in the cytoplasmic fraction. In certain embodiments, a one liter culture of cells expressing a polypeptide of the invention will produce at least about 0.1, 0.2, 0.5, 1, 2, 5, 10, 20, 30, 40, 50 milligrams or more of soluble protein. In an exemplary embodiment, a polypeptide of the invention is at least about 10% soluble and will produce at least about 1 milligram of protein from a one liter cell culture.

[0568] The term “specifically hybridizes” refers to detectable and specific nucleic acid binding. Polynucleotides, oligonucleotides and nucleic acids of the invention selectively hybridize to nucleic acid strands under hybridization and wash conditions that minimize appreciable amounts of detectable binding to nonspecific nucleic acids. Stringent conditions may be used to achieve selective hybridization conditions as known in the art and discussed herein. Generally, the nucleic acid sequence homology between the polynucleotides, oligonucleotides, and nucleic acids of the invention and a nucleic acid sequence of interest will be at least 30%, 40%, 50%, 60%, 70%, 80%, 85%, 90%, 95%, 98%, 99%, or more. In certain instances, hybridization and washing conditions are performed under stringent conditions according to conventional hybridization procedures and as described further herein.

[0569] The terms “stringent conditions” or “stringent hybridization conditions” refer to conditions which promote specific hydribization between two complementary polynucleotide strands so as to form a duplex. Stringent conditions may be selected to be about 5° C. lower than the thermal melting point (Tm) for a given polynucleotide duplex at a defined ionic strength and pH. The length of the complementary polynucleotide strands and their GC content will determine the Tm of the duplex, and thus the hybridization conditions necessary for obtaining a desired specificity of hybridization. The Tm is the temperature (under defined ionic strength and pH) at which 50% of the a polynucleotide sequence hybridizes to a perfectly matched complementary strand. In certain cases it may be desirable to increase the stringency of the hybridization conditions to be about equal to the Tm for a particular duplex.

[0570] A variety of techniques for estimating the Tm are available. Typically, G-C base pairs in a duplex are estimated to contribute about 3° C. to the Tm, while A-T base pairs are estimated to contribute about 2° C., up to a theoretical maximum of about 80-100° C. However, more sophisticated models of Tm are available in which G-C stacking interactions, solvent effects, the desired assay temperature and the like are taken into account. For example, probes can be designed to have a dissociation temperature (Td) of approximately 60° C., using the formula: Td=(((((3×#GC)+(2×#AT))×37)−562)/#bp)−5; where #GC, #AT, and #bp are the number of guanine-cytosine base pairs, the number of adenine-thymine base pairs, and the number of total base pairs, respectively, involved in the formation of the duplex.

[0571] Hybridization may be carried out in 5×SSC, 4×SSC, 3×SSC, 2×SSC, 1×SSC or 0.2×SSC for at least about 1 hour, 2 hours, 5 hours, 12 hours, or 24 hours. The temperature of the hybridization may be increased to adjust the stringency of the reaction, for example, from about 25° C. (room temperature), to about 45° C., 50° C., 55° C., 60° C., or 65° C. The hybridization reaction may also include another agent affecting the stringency, for example, hybridization conducted in the presence of 50% formamide increases the stringency of hybridization at a defined temperature.

[0572] The hybridization reaction may be followed by a single wash step, or two or more wash steps, which may be at the same or a different salinity and temperature. For example, the temperature of the wash may be increased to adjust the stringency from about 25° C. (room temperature), to about 45° C., 50° C., 55° C., 60° C., 65° C., or higher. The wash step may be conducted in the presence of a detergent, e.g., 0.1 or 0.2% SDS. For example, hybridization may be followed by two wash steps at 65° C. each for about 20 minutes in 2×SSC, 0.1% SDS, and optionally two additional wash steps at 65° C. each for about 20 minutes in 0.2×SSC, 0.1% SDS.

[0573] Exemplary stringent hybridization conditions include overnight hybridization at 65° C. in a solution comprising, or consisting of, 50% formamide, 10× Denhardt (0.2% Ficoll, 0.2% Polyvinylpyrrolidone, 0.2% bovine serum albumin) and 200 μg/ml of denatured carrier DNA, e.g., sheared salmon sperm DNA, followed by two wash steps at 65° C. each for about 20 minutes in 2×SSC, 0.1% SDS, and two wash steps at 65° C. each for about 20 minutes in 0.2×SSC, 0.1% SDS.

[0574] Hybridization may consist of hybridizing two nucleic acids in solution, or a nucleic acid in solution to a nucleic acid attached to a solid support, e.g., a filter. When one nucleic acid is on a solid support, a prehybridization step may be conducted prior to hybridization. Prehybridization may be carried out for at least about 1 hour, 3 hours or 10 hours in the same solution and at the same temperature as the hybridization solution (without the complementary polynucleotide strand).

[0575] Appropriate stringency conditions are known to those skilled in the art or may be determined experimentally by the skilled artisan. See, for example, Current Protocols in Molecular Biology, John Wiley & Sons, N.Y. (1989), 6.3.1-12.3.6; Sambrook et al., 1989, Molecular Cloning, A Laboratory Manual, Cold Spring Harbor Press, N.Y; S. Agrawal (ed.) Methods in Molecular Biology, volume 20; Tijssen (1993) Laboratory Techniques in biochemistry and molecular biology-hybridization with nucleic acid probes, e.g., part I chapter 2 “Overview of principles of hybridization and the strategy of nucleic acid probe assays”, Elsevier, N.Y.; and Tibanyenda, N. et al., Eur. J. Biochem. 139:19 (1984) and Ebel, S. et al., Biochem. 31:12083 (1992).

[0576] The term “subject nucleic acid sequences” refers to all the nucleotide sequences that are subject nucleic acid sequences (predicted) and subject nucleic acid sequences (experimental) (as both those terms are defined below), and the term “a subject nucleic acid sequence” refers to one (and optionally more) of those nucleotide sequences. The term “subject nucleic acid sequences (experimental)” refers to the nucleotide sequences set forth in SEQ ID NO: 6, SEQ ID NO: 15, SEQ ID NO: 24, SEQ ID NO: 33, SEQ ID NO: 42, SEQ ID NO: 51, SEQ ID NO: 60, SEQ ID NO: 69, SEQ ID NO: 78, SEQ ID NO: 87, SEQ ID NO: 96, SEQ ID NO: 105, SEQ ID NO: 114, SEQ ID NO: 123, SEQ ID NO: 132, SEQ ID NO: 141, SEQ ID NO: 150, SEQ ID NO: 159, SEQ ID NO: 168, SEQ ID NO: 177, SEQ ID NO: 186, SEQ ID NO: 195, SEQ ID NO: 204, SEQ ID NO: 213, SEQ ID NO: 222, SEQ ID NO: 231, SEQ ID NO: 240, SEQ ID NO: 249, SEQ ID NO: 258, SEQ ID NO: 267, SEQ ID NO: 276, SEQ ID NO: 285, SEQ ID NO: 294, SEQ ID NO: 303, SEQ ID NO: 312, SEQ ID NO: 321, SEQ ID NO: 330, SEQ ID NO: 339, SEQ ID NO: 348, SEQ ID NO: 357, SEQ ID NO: 366, SEQ ID NO: 375, SEQ ID NO: 384, SEQ ID NO: 393, SEQ ID NO: 402, SEQ ID NO: 411, SEQ ID NO: 420, SEQ ID NO: 429, SEQ ID NO: 438, SEQ ID NO: 447, SEQ ID NO: 456, SEQ ID NO: 465, SEQ ID NO: 474, SEQ ID NO: 483, SEQ ID NO: 492, SEQ ID NO: 501, SEQ ID NO: 510, SEQ ID NO: 519, SEQ ID NO: 528, SEQ ID NO: 537, SEQ ID NO: 546, SEQ ID NO: 555, SEQ ID NO: 564, SEQ ID NO: 573, and any other nucleic acid sequences set forth in the Figures that by comparison to the foregoing sequences should be included in this definition, and the term “a subject nucleic acid sequence (experimental)” refers to one (and optionally more) of those nucleotide sequences. The term “subject nucleic acid sequences (predicted)” refers to the nucleotide sequences set forth in SEQ ID NO: 4, SEQ ID NO: 13, SEQ ID NO: 22, SEQ ID NO: 31, SEQ ID NO: 40, SEQ ID NO: 49, SEQ ID NO: 58, SEQ ID NO: 67, SEQ ID NO: 76, SEQ ID NO: 85, SEQ ID NO: 94, SEQ ID NO: 103, SEQ ID NO: 112, SEQ ID NO: 121, SEQ ID NO: 130, SEQ ID NO: 139, SEQ ID NO: 148, SEQ ID NO: 157, SEQ ID NO: 166, SEQ ID NO: 175, SEQ ID NO: 184, SEQ ID NO: 193, SEQ ID NO: 202, SEQ ID NO: 211, SEQ ID NO: 220, SEQ ID NO: 229, SEQ ID NO: 238, SEQ ID NO: 247, SEQ ID NO: 256, SEQ ID NO: 265, SEQ ID NO: 274, SEQ ID NO: 283, SEQ ID NO: 292, SEQ ID NO: 301, SEQ ID NO: 310, SEQ ID NO: 319, SEQ ID NO: 328, SEQ ID NO: 337, SEQ ID NO: 346, SEQ ID NO: 355, SEQ ID NO: 364, SEQ ID NO: 373, SEQ ID NO: 382, SEQ ID NO: 391, SEQ ID NO: 400, SEQ ID NO: 409, SEQ ID NO: 418, SEQ ID NO: 427, SEQ ID NO: 436, SEQ ID NO: 445, SEQ ID NO: 454, SEQ ID NO: 463, SEQ ID NO: 472, SEQ ID NO: 481, SEQ ID NO: 490, SEQ ID NO: 499, SEQ ID NO: 508, SEQ ID NO: 517, SEQ ID NO: 526, SEQ ID NO: 535, SEQ ID NO: 544, SEQ ID NO: 553, SEQ ID NO: 562, SEQ ID NO: 571, and any other nucleic acid sequences set forth in the Figures that by comparison to the foregoing sequences should be included in this definition, and the term “a subject nucleic acid sequence (predicted)” refers to one (and optionally more) of those nucleotide sequences.

[0577] The term “subject amino acid sequences” refers to all the amino acid sequences that are subject amino acid sequences (predicted) and subject amino acid sequences (experimental) (as both those terms are defined below), and the term “a subject amino acid sequence” refers to one (and optionally more) of those amino acid sequences. The term “subject amino acid sequences (experimental)” refers to the amino acid sequences set forth in SEQ ID NO: 7, SEQ ID NO: 16, SEQ ID NO: 25, SEQ ID NO: 34, SEQ ID NO: 43, SEQ ID NO: 52, SEQ ID NO: 61, SEQ ID NO: 70, SEQ ID NO: 79, SEQ ID NO: 88, SEQ ID NO: 97, SEQ ID NO: 106, SEQ ID NO: 115, SEQ ID NO: 124, SEQ ID NO: 133, SEQ ID NO: 142, SEQ ID NO: 151, SEQ ID NO: 160, SEQ ID NO: 169, SEQ ID NO: 178, SEQ ID NO: 187, SEQ ID NO: 196, SEQ ID NO: 205, SEQ ID NO: 214, SEQ ID NO: 223, SEQ ID NO: 232, SEQ ID NO: 241, SEQ ID NO: 250, SEQ ID NO: 259, SEQ ID NO: 268, SEQ ID NO: 277, SEQ ID NO: 286, SEQ ID NO: 295, SEQ ID NO: 304, SEQ ID NO: 313, SEQ ID NO: 322, SEQ ID NO: 331, SEQ ID NO: 340, SEQ ID NO: 349, SEQ ID NO: 358, SEQ ID NO: 367, SEQ ID NO: 376, SEQ ID NO: 385, SEQ ID NO: 394, SEQ ID NO: 403, SEQ ID NO: 412, SEQ ID NO: 421, SEQ ID NO: 430, SEQ ID NO: 439, SEQ ID NO: 448, SEQ ID NO: 457, SEQ ID NO: 466, SEQ ID NO: 475, SEQ ID NO: 484, SEQ ID NO: 493, SEQ ID NO: 502, SEQ ID NO: 511, SEQ ID NO: 520, SEQ ID NO: 529, SEQ ID NO: 538, SEQ ID NO: 547, SEQ ID NO: 556, SEQ ID NO: 565, SEQ ID NO: 574, and any other amino acid sequences set forth in the Figures that by comparison to the foregoing sequences should be included in this definition, and the term “a subject amino acid sequence (experimental)” refers to one (and optionally more) of those amino acid sequences. The term “subject amino acid sequences (predicted)” refers to the amino acid sequences set forth in SEQ ID NO: 5, SEQ ID NO: 14, SEQ ID NO: 23, SEQ ID NO: 32, SEQ ID NO: 41, SEQ ID NO: 50, SEQ ID NO: 59, SEQ ID NO: 68, SEQ ID NO: 77, SEQ ID NO: 86, SEQ ID NO: 95, SEQ ID NO: 104, SEQ ID NO: 113, SEQ ID NO: 122, SEQ ID NO: 131, SEQ ID NO: 140, SEQ ID NO: 149, SEQ ID NO: 158, SEQ ID NO: 167, SEQ ID NO: 176, SEQ ID NO: 185, SEQ ID NO: 194, SEQ ID NO: 203, SEQ ID NO: 212, SEQ ID NO: 221, SEQ ID NO: 230, SEQ ID NO: 239, SEQ ED NO: 248, SEQ ID NO: 257, SEQ ID NO: 266, SEQ ID NO: 275, SEQ ID NO: 284, SEQ ID NO: 293, SEQ ID NO: 302, SEQ ID NO: 311, SEQ ID NO: 320, SEQ ID NO: 329, SEQ ID NO: 338, SEQ ID NO: 347, SEQ ID NO: 356, SEQ ID NO: 365, SEQ ID NO: 374, SEQ ID NO: 383, SEQ ID NO: 392, SEQ ID NO: 401, SEQ ID NO: 410, SEQ ID NO: 419, SEQ ID NO: 428, SEQ ID NO: 437, SEQ ID NO: 446, SEQ ID NO: 455, SEQ ID NO: 464, SEQ ID NO: 473, SEQ ID NO: 482, SEQ ID NO: 491, SEQ ID NO: 500, SEQ ID NO: 509, SEQ ID NO: 518, SEQ ID NO: 527, SEQ ID NO: 536, SEQ ID NO: 545, SEQ ID NO: 554, SEQ ID NO: 563, SEQ ID NO: 572, and any other amino acid sequences set forth in the Figures that by comparison to the foregoing sequences should be included in this definition, and the term “a subject amino acid sequence (predicted)” refers to one (and optionally more) of those amino acid sequences.

[0578] As applied to proteins, the term “substantial identity” means that two protein sequences, when optimally aligned, such as by the programs GAP or BESTFIT using default gap weights, typically share at least about 70 percent sequence identity, alternatively at least about 80, 85, 90, 95 percent sequence identity or more. In certain instances, residue positions that are not identical differ by conservative amino acid substitutions, which are described above.

[0579] The term “structural motif”, when used in reference to a polypeptide, refers to a polypeptide that, although it may have different amino acid sequences, may result in a similar structure, wherein by structure is meant that the motif forms generally the same tertiary structure, or that certain amino acid residues within the motif, or alternatively their backbone or side chains (which may or may not include the Cα atoms of the side chains) are positioned in a like relationship with respect to one another in the motif.

[0580] The term “test compound” refers to a molecule to be tested by one or more screening method(s) as a putative modulator of a polypeptide of the invention or other biological entity or process. A test compound is usually not known to bind to a target of interest. The term “control test compound” refers to a compound known to bind to the target (e.g., a known agonist, antagonist, partial agonist or inverse agonist). The term “test compound” does not include a chemical added as a control condition that alters the function of the target to determine signal specificity in an assay. Such control chemicals or conditions include chemicals that 1) nonspecifically or substantially disrupt protein structure (e.g., denaturing agents (e.g., urea or guanidinium), chaotropic agents, sulfhydryl reagents (e.g., dithiothreitol and β-mercaptoethanol), and proteases), 2) generally inhibit cell metabolism (e.g., mitochondrial uncouplers) and 3) non-specifically disrupt electrostatic or hydrophobic interactions of a protein (e.g., high salt concentrations, or detergents at concentrations sufficient to non-specifically disrupt hydrophobic interactions). Further, the term “test compound” also does not include compounds known to be unsuitable for a therapeutic use for a particular indication due to toxicity of the subject. In certain embodiments, various predetermined concentrations of test compounds are used for screening such as 0.01 μM, 0.1 μM, 1.0 μM, and 10.0 μM. Examples of test compounds include, but are not limited to, peptides, nucleic acids, carbohydrates, and small molecules. The term “novel test compound” refers to a test compound that is not in existence as of the filing date of this application. In certain assays using novel test compounds, the novel test compounds comprise at least about 50%, 75%, 85%, 90%, 95% or more of the test compounds used in the assay or in any particular trial of the assay.

[0581] The term “therapeutically effective amount” refers to that amount of a modulator, drug or other molecule which is sufficient to effect treatment when administered to a subject in need of such treatment. The therapeutically effective amount will vary depending upon the subject and disease condition being treated, the weight and age of the subject, the severity of the disease condition, the manner of administration and the like, which can readily be determined by one of ordinary skill in the art.

[0582] The term “transfection” means the introduction of a nucleic acid, e.g., an expression vector, into a recipient cell, which in certain instances involves nucleic acid-mediated gene transfer. The term “transformation” refers to a process in which a cell's genotype is changed as a result of the cellular uptake of exogenous nucleic acid. For example, a transformed cell may express a recombinant form of a polypeptide of the invention or antisense expression may occur from the transferred gene so that the expression of a naturally-occurring form of the gene is disrupted.

[0583] The term “transgene” means a nucleic acid sequence, which is partly or entirely heterologous to a transgenic animal or cell into which it is introduced, or, is homologous to an endogenous gene of the transgenic animal or cell into which it is introduced, but which is designed to be inserted, or is inserted, into the animal's genome in such a way as to alter the genome of the cell into which it is inserted (e.g., it is inserted at a location which differs from that of the natural gene or its insertion results in a knockout). A transgene may include one or more regulatory sequences and any other nucleic acids, such as introns, that may be necessary for optimal expression.

[0584] The term “transgenic animal” refers to any animal, for example, a mouse, rat or other non-human mammal, a bird or an amphibian, in which one or more of the cells of the animal contain heterologous nucleic acid introduced by way of human intervention, such as by transgenic techniques well known in the art. The nucleic acid is introduced into the cell, directly or indirectly, by way of deliberate genetic manipulation, such as by microinjection or by infection with a recombinant virus. The term genetic manipulation does not include classical cross-breeding, or in vitro fertilization, but rather is directed to the introduction of a recombinant DNA molecule. This molecule may be integrated within a chromosome, or it may be extrachromosomally replicating DNA. In the typical transgenic animals described herein, the transgene causes cells to express a recombinant form of a protein. However, transgenic animals in which the recombinant gene is silent are also contemplated.

[0585] The term “vector” refers to a nucleic acid capable of transporting another nucleic acid to which it has been linked. One type of vector which may be used in accord with the invention is an episome, i.e., a nucleic acid capable of extra-chromosomal replication. Other vectors include those capable of autonomous replication and expression of nucleic acids to which they are linked. Vectors capable of directing the expression of genes to which they are operatively linked are referred to herein as “expression vectors”. In general, expression vectors of utility in recombinant DNA techniques are often in the form of “plasmids” which refer to circular double stranded DNA molecules which, in their vector form are not bound to the chromosome. In the present specification, “plasmid” and “vector” are used interchangeably as the plasmid is the most commonly used form of vector. However, the invention is intended to include such other forms of expression vectors which serve equivalent functions and which become known in the art subsequently hereto.

[0586] Unless otherwise indicated, all numbers expressing quantities of ingredients, reaction conditions, and so forth used in the specification and claims are to be understood as being modified in all instances by the term “about.” Accordingly, unless indicated to the contrary, the numerical parameters set forth in this specification and attached claims are approximations that may vary depending upon the desired properties sought to be obtained by the present invention.

### 2. Polypeptides of the Invention

[0587] The present invention makes available in a variety of embodiments soluble, purified and/or isolated forms of the polypeptides of the invention. Milligram quantities of exemplary polypeptides of the invention (optionally with a tag and optionally labeled) have been isolated in a highly purified form. The present invention provides for expressing and purifying polypeptides of the invention in quantities that equal or exceed the quantity of polypeptide(s) of the invention expressed and purified as provided in the Exemplification section below (or smaller amount(s) thereof, such as 25%, 33%, 50% or 75% of the amount(s) so expressed and/or purified).

[0588] In one aspect, the present invention contemplates an isolated polypeptide comprising (a) a subject amino acid sequence, (b) the subject amino acid sequence with 1 to about 20 conservative amino acid substitutions, deletions or additions, (c) an amino acid sequence that is at least 90% identical to the subject amino acid sequence, or (d) a functional fragment of a polypeptide having an amino acid sequence set forth in (a), (b) or (c). In another aspect, the present invention contemplates a composition comprising such an isolated polypeptide and less than about 10%, or alternatively 5%, or alternatively 1%, contaminating biological macromolecules or polypeptides.

[0589] It may be the case that the amino acid sequence for a polypeptide of the invention predicted from the publicly available genomic information differs from the amino acid sequence determined from the experimentally determined nucleic acid by one or more amino acids. For example, in the case of lysyl-tRNA synthetase (lysS) from S. aureus, SEQ ID NO: 7 is determined from the experimentally determined nucleic acid sequence SEQ ID NO: 6, and SEQ ID NO: 5 is determined from SEQ ID NO: 4, which is obtained as described in EXAMPLE 1. In such a case, the present invention contemplates the specific amino acid sequences of SEQ ID NO: 5 and SEQ ID NO: 7, and variants thereof, as well as any differences (if any) in the polypeptides of the invention based on those SEQ ID NOS and nucleic acid sequences encoding the same (including subject nucleic acid sequences).

[0590] In certain embodiments, a polypeptide of the invention is a fusion protein containing a domain which increases its solubility and/or facilitates its purification, identification, detection, and/or structural characterization. Exemplary domains, include, for example, glutathione S-transferase (GST), protein A, protein G, calmodulin-binding peptide, thioredoxin, maltose binding protein, HA, myc, poly arginine, poly His, poly His-Asp or FLAG fusion proteins and tags. Additional exemplary domains include domains that alter protein localization in vivo, such as signal peptides, type III secretion system-targeting peptides, transcytosis domains, nuclear localization signals, etc. In various embodiments, a polypeptide of the invention may comprise one or more heterologous fusions. Polypeptides may contain multiple copies of the same fusion domain or may contain fusions to two or more different domains. The fusions may occur at the N-terminus of the polypeptide, at the C-terminus of the polypeptide, or at both the N- and C-terminus of the polypeptide. It is also within the scope of the invention to include linker sequences between a polypeptide of the invention and the fusion domain in order to facilitate construction of the fusion protein or to optimize protein expression or structural constraints of the fusion protein. In another embodiment, the polypeptide may be constructed so as to contain protease cleavage sites between the fusion polypeptide and polypeptide of the invention in order to remove the tag after protein expression or thereafter. Examples of suitable endoproteases, include, for example, Factor Xa and TEV proteases.

[0591] In another embodiment, a polypeptide of the invention may be modified so that its rate of traversing the cellular membrane is increased. For example, the polypeptide may be fused to a second peptide which promotes “transcytosis,” e.g., uptake of the peptide by cells. The peptide may be a portion of the HIV transactivator (TAT) protein, such as the fragment corresponding to residues 37-62 or 48-60 of TAT, portions which have been observed to be rapidly taken up by a cell in vitro (Green and Loewenstein, (1989) Cell 55:1179-1188). Alternatively, the internalizing peptide may be derived from the Drosophila antennapedia protein, or homologs thereof. The 60 amino acid long homeodomain of the homeo-protein antennapedia has been demonstrated to translocate through biological membranes and can facilitate the translocation of heterologous polypeptides to which it is coupled. Thus, polypeptides may be fused to a peptide consisting of about amino acids 42-58 of Drosophila antennapedia or shorter fragments for transcytosis (Derossi et al. (1996) J Biol Chem 271:18188-18193; Derossi et al. (1994) J Biol Chem 269:10444-10450; and Perez et al. (1992) J Cell Sci 102:717-722). The transcytosis polypeptide may also be a non-naturally-occurring membrane-translocating sequence (MTS), such as the peptide sequences disclosed in U.S. Pat. No. 6,248,558.

[0592] In another embodiment, a polypeptide of the invention is labeled with an isotopic label to facilitate its detection and or structural characterization using nuclear magnetic resonance or another applicable technique. Exemplary isotopic labels include radioisotopic labels such as, for example, potassium-40 (⁴⁰K), carbon-14 (¹⁴C), tritium (³H), sulphur-35 (³⁵S), phosphorus-32 (³²P), technetium-99m (^{99m}Tc), thallium-201 (²⁰¹Tl), gallium-67 (⁶⁷Ga), indium-111 (¹¹¹In), iodine-123 (¹²³I ), iodine-131 (¹³¹I), yttrium-90 (⁹⁰Y), samarium-153 (¹⁵³Sm), rhenium-186 (¹⁸⁶Re), rhenium-188 (¹⁸⁸Re), dysprosium-165 (⁶⁵Dy) and holmium-166 (¹⁶⁶Ho). The isotopic label may also be an atom with non zero nuclear spin, including, for example, hydrogen-1 (¹H), hydrogen-2 (²H), hydrogen-3 (³H), phosphorous-31 (³¹P), sodium-23 (²³ Na), nitrogen-14 (¹⁴ N), nitrogen-15 (¹⁵ N), carbon-13 (¹³C) and fluorine-19 (⁹F). In certain embodiments, the polypeptide is uniformly labeled with an isotopic label, for example, wherein at least 50%, 70%, 80%, 90%, 95%, or 98% of the possible labels in the polypeptide are labeled, e.g., wherein at least 50%, 70%, 80%, 90%, 95%, or 98% of the nitrogen atoms in the polypeptide are ¹⁵N, and/or wherein at least 50%, 70%, 80%, 90%, 95%, or 98% of the carbon atoms in the polypeptide are ¹³C, and/or wherein at least 50%, 70%, 80%, 90%, 95%, or 98% of the hydrogen atoms in the polypeptide are ²H. In other embodiments, the isotopic label is located in one or more specific locations within the polypeptide, for example, the label may be specifically incorporated into one or more of the leucine residues of the polypeptide. The invention also encompasses the embodiment wherein a single polypeptide comprises two, three or more different isotopic labels, for example, the polypeptide comprises both ¹⁵N and ¹³C labeling.

[0593] In yet another embodiment, the polypeptides of the invention are labeled to facilitate structural characterization using x-ray crystallography or another applicable technique. Exemplary labels include heavy atom labels such as, for example, cobalt, selenium, krypton, bromine, strontium, molybdenum, ruthenium, rhodium, palladium, silver, cadmium, tin, iodine, xenon, barium, lanthanum, cerium, praseodymium, neodymium, samarium, europium, gadolinium, terbium, dysprosium, holmium, erbium, thulium, ytterbium, lutetium, tantalum, tungsten, rhenium, osmium, iridium, platinum, gold, mercury, thallium, lead, thorium and uranium. In an exemplary embodiment, the polypeptide is labeled with seleno-methionine.

[0594] A variety of methods are available for preparing a polypeptide with a label, such as a radioisotopic label or heavy atom label. For example, in one such method, an expression vector comprising a nucleic acid encoding a polypeptide is introduced into a host cell, and the host cell is cultured in a cell culture medium in the presence of a source of the label, thereby generating a labeled polypeptide. As indicated above, the extent to which a polypeptide may be labeled may vary.

[0595] In still another embodiment, the polypeptides of the invention are labeled with a fluorescent label to facilitate their detection, purification, or structural characterization. In an exemplary embodiment, a polypeptide of the invention is fused to a heterologous polypeptide sequence which produces a detectable fluorescent signal, including, for example, green fluorescent protein (GFP), enhanced green fluorescent protein (EGFP), Renilla Reniformis green fluorescent protein, GFPmut2, GFPuv4, enhanced yellow fluorescent protein (EYFP), enhanced cyan fluorescent protein (ECFP), enhanced blue fluorescent protein (EBFP), citrine and red fluorescent protein from discosoma (dsRED).

[0596] In other embodiments, the invention provides for polypeptides of the invention immobilized onto a solid surface, including, plates, microtiter plates, slides, beads, particles, spheres, films, strands, precipitates, gels, sheets, tubing, containers, capillaries, pads, slices, etc. The polypeptides of the invention may be immobilized onto a “chip” as part of an array. An array, having a plurality of addresses, may comprise one or more polypeptides of the invention in one or more of those addresses. In one embodiment, the chip comprises one or more polypeptides of the invention as part of an array that contains at least some polypeptide sequences from the pathogen of origin.

[0597] In still other embodiments, the invention comprises the polypeptide sequences of the invention in computer readable format. The invention also encompasses a database comprising the polypeptide sequences of the invention.

[0598] In other embodiments, the invention relates to the polypeptides of the invention contained within a vessels useful for manipulation of the polypeptide sample. For example, the polypeptides of the invention may be contained within a microtiter plate to facilitate detection, screening or purification of the polypeptide. The polypeptides may also be contained within a syringe as a container suitable for administering the polypeptide to a subject in order to generate antibodies or as part of a vaccination regimen. The polypeptides may also be contained within an NMR tube in order to enable characterization by nuclear magnetic resonance techniques.

[0599] In still other embodiments, the invention relates to a crystallized polypeptide of the invention and crystallized polypeptides which have been mounted for examination by x-ray crystallography as described further below. In certain instances, a polypeptide of the invention in crystal form may be single crystals of various dimensions (e.g., micro-crystals) or may be an aggregate of crystalline material. In another aspect, the present invention contemplates a crystallized complex including a polypeptide of the invention and one or more of the following: a co-factor (such as a salt, metal, nucleotide, oligonucleotide or polypeptide), a modulator, or a small molecule. In another aspect, the present invention contemplates a crystallized complex including a polypeptide of the invention and any other molecule or atom (such as a metal ion) that associates with the polypeptide in vivo.

[0600] In certain embodiments, polypeptides of the invention may be synthesized chemically, ribosomally in a cell free system, or ribosomally within a cell. Chemical synthesis of polypeptides of the invention may be carried out using a variety of art recognized methods, including stepwise solid phase synthesis, semi-synthesis through the conformationally-assisted re-ligation of peptide fragments, enzymatic ligation of cloned or synthetic peptide segments, and chemical ligation. Native chemical ligation employs a chemoselective reaction of two unprotected peptide segments to produce a transient thioester-linked intermediate. The transient thioester-linked intermediate then spontaneously undergoes a rearrangement to provide the full length ligation product having a native peptide bond at the ligation site. Full length ligation products are chemically identical to proteins produced by cell free synthesis. Full length ligation products may be refolded and/or oxidized, as allowed, to form native disulfide-containing protein molecules. (see e.g., U.S. Pat. Nos. 6,184,344 and 6,174,530; and T. W. Muir et al., Curr. Opin. Biotech. (1993): vol. 4, p 420; M. Miller, et al., Science (1989): vol. 246, p 1149; A. Wlodawer, et al., Science (1989): vol. 245, p 616; L. H. Huang, et al., Biochemistry (1991): vol. 30, p 7402; M. Schnolzer, et al., Int. J. Pept. Prot. Res. (1992): vol. 40, p 180-193; K. Rajarathnam, et al., Science (1994): vol. 264, p 90; R. E. Offord, “Chemical Approaches to Protein Engineering”, in Protein Design and the Development of New therapeutics and Vaccines, J. B. Hook, G. Poste, Eds., (Plenum Press, New York, 1990) pp. 253-282; C. J. A. Wallace, et al., J. Biol. Chem. (1992): vol. 267, p 3852; L. Abrahmsen, et al., Biochemistry (1991): vol. 30, p 4151; T. K. Chang, et al., Proc. Natl. Acad. Sci. USA (1994) 91: 12544-12548; M. Schnlzer, et al., Science (1992): vol., 3256, p 221; and K. Akaji, et al., Chem. Pharm. Bull. (Tokyo) (1985) 33: 184).

[0601] In certain embodiments, it may be advantageous to provide naturally-occurring or experimentally-derived homologs of a polypeptide of the invention. Such homologs may function in a limited capacity as a modulator to promote or inhibit a subset of the biological activities of the naturally-occurring form of the polypeptide. Thus, specific biological effects may be elicited by treatment with a homolog of limited function, and with fewer side effects relative to treatment with agonists or antagonists which are directed to all of the biological activities of a polypeptide of the invention. For instance, antagonistic homologs may be generated which interfere with the ability of the wild-type polypeptide of the invention to associate with certain proteins, but which do not substantially interfere with the formation of complexes between the native polypeptide and other cellular proteins.

[0602] Another aspect of the invention relates to polypeptides derived from the full-length polypeptides of the invention. Isolated peptidyl portions of those polypeptides may be obtained by screening polypeptides recombinantly produced from the corresponding fragment of the nucleic acid encoding such polypeptides. In addition, fragments may be chemically synthesized using techniques known in the art such as conventional Merrifield solid phase f-Moc or t-Boc chemistry. For example, proteins may be arbitrarily divided into fragments of desired length with no overlap of the fragments, or may be divided into overlapping fragments of a desired length. The fragments may be produced (recombinantly or by chemical synthesis) and tested to identify those peptidyl fragments having a desired property, for example, the capability of functioning as a modulator of the polypeptides of the invention. In an illustrative embodiment, peptidyl portions of a protein of the invention may be tested for binding activity, as well as inhibitory ability, by expression as, for example, thioredoxin fusion proteins, each of which contains a discrete fragment of a protein of the invention (see, for example, U.S. Pat. Nos. 5,270,181 and 5,292,646; and PCT publication WO94/02502).

[0603] In another embodiment, truncated polypeptides may be prepared. Truncated polypeptides have from 1 to 20 or more amino acid residues removed from either or both the N- and C-termini. Such truncated polypeptides may prove more amenable to expression, purification or characterization than the full-length polypeptide. For example, truncated polypeptides may prove more amenable than the full-length polypeptide to crystallization, to yielding high quality diffracting crystals or to yielding an HSQC with high intensity peaks and minimally overlapping peaks. In addition, the use of truncated polypeptides may also identify stable and active domains of the full-length polypeptide that may be more amenable to characterization.

[0604] It is also possible to modify the structure of the polypeptides of the invention for such purposes as enhancing therapeutic or prophylactic efficacy, or stability (e.g., ex vivo shelf life, resistance to proteolytic degradation in vivo, etc.). Such modified polypeptides, when designed to retain at least one activity of the naturally-occurring form of the protein, are considered “functional equivalents” of the polypeptides described in more detail herein. Such modified polypeptides may be produced, for instance, by amino acid substitution, deletion, or addition, which substitutions may consist in whole or part by conservative amino acid substitutions.

[0605] For instance, it is reasonable to expect that an isolated conservative amino acid substitution, such as replacement of a leucine with an isoleucine or valine, an aspartate with a glutamate, a threonine with a serine, will not have a major affect on the biological activity of the resulting molecule. Whether a change in the amino acid sequence of a polypeptide results in a functional homolog may be readily determined by assessing the ability of the variant polypeptide to produce a response similar to that of the wild-type protein. Polypeptides in which more than one replacement has taken place may readily be tested in the same manner.

[0606] This invention further contemplates a method of generating sets of combinatorial mutants of polypeptides of the invention, as well as truncation mutants, and is especially useful for identifying potential variant sequences (e.g. homologs). The purpose of screening such combinatorial libraries is to generate, for example, homologs which may modulate the activity of a polypeptide of the invention, or alternatively, which possess novel activities altogether. Combinatorially-derived homologs may be generated which have a selective potency relative to a naturally-occurring protein. Such homologs may be used in the development of therapeutics.

[0607] Likewise, mutagenesis may give rise to homologs which have intracellular half-lives dramatically different than the corresponding wild-type protein. For example, the altered protein may be rendered either more stable or less stable to proteolytic degradation or other cellular process which result in destruction of, or otherwise inactivation of the protein. Such homologs, and the genes which encode them, may be utilized to alter protein expression by modulating the half-life of the protein. As above, such proteins may be used for the development of therapeutics or treatment.

[0608] In similar fashion, protein homologs may be generated by the present combinatorial approach to act as antagonists, in that they are able to interfere with the activity of the corresponding wild-type protein.

[0609] In a representative embodiment of this method, the amino acid sequences for a population of protein homologs are aligned, preferably to promote the highest homology possible. Such a population of variants may include, for example, homologs from one or more species, or homologs from the same species but which differ due to mutation. Amino acids which appear at each position of the aligned sequences are selected to create a degenerate set of combinatorial sequences. In certain embodiments, the combinatorial library is produced by way of a degenerate library of genes encoding a library of polypeptides which each include at least a portion of potential protein sequences. For instance, a mixture of synthetic oligonucleotides may be enzymatically ligated into gene sequences such that the degenerate set of potential nucleotide sequences are expressible as individual polypeptides, or alternatively, as a set of larger fusion proteins (e.g. for phage display).

[0610] There are many ways by which the library of potential homologs may be generated from a degenerate oligonucleotide sequence. Chemical synthesis of a degenerate gene sequence may be carried out in an automatic DNA synthesizer, and the synthetic genes may then be ligated into an appropriate vector for expression. One purpose of a degenerate set of genes is to provide, in one mixture, all of the sequences encoding the desired set of potential protein sequences. The synthesis of degenerate oligonucleotides is well known in the art (see for example, Narang, S A (1983) Tetrahedron 39:3; Itakura et al., (1981) Recombinant DNA, Proc. 3rd Cleveland Sympos. Macromolecules, ed. AG Walton, Amsterdam: Elsevier pp. 273-289; Itakura et al., (1984) Annu. Rev. Biochem. 53:323; Itakura et al., (1984) Science 198:1056; Ike et al., (1983) Nucleic Acid Res. 11:477). Such techniques have been employed in the directed evolution of other proteins (see, for example, Scott et al., (1990) Science 249:386-390; Roberts et al., (1992) PNAS USA 89:2429-2433; Devlin et al., (1990) Science 249: 404-406; Cwirla et al., (1990) PNAS USA 87: 6378-6382; as well as U.S. Pat. Nos. 5,223,409, 5,198,346, and 5,096,815).

[0611] Alternatively, other forms of mutagenesis may be utilized to generate a combinatorial library. For example, protein homologs (both agonist and antagonist forms) may be generated and isolated from a library by screening using, for example, alanine scanning mutagenesis and the like (Ruf et al., (1994) Biochemistry 33:1565-1572; Wang et al., (1994) J. Biol. Chem. 269:3095-3099; Balint et al., (1993) Gene 137:109-118; Grodberg et al., (1993) Eur. J. Biochem. 218:597-601; Nagashima et al., (1993) J. Biol. Chem. 268:2888-2892; Lowman et al., (1991) Biochemistry 30:10832-10838; and Cunningham et al., (1989) Science 244:1081-1085), by linker scanning mutagenesis (Gustin et al., (1993) Virology 193:653-660; Brown et al., (1992) Mol. Cell Biol. 12:2644-2652; McKnight et al., (1982) Science 232:316); by saturation mutagenesis (Meyers et al., (1986) Science 232:613); by PCR mutagenesis (Leung et al., (1989) Method Cell Mol Biol 1:11-19); or by random mutagenesis (Miller et al., (1992) A Short Course in Bacterial Genetics, CSHL Press, Cold Spring Harbor, N.Y.; and Greener et al., (1994) Strategies in Mol Biol 7:32-34). Linker scanning mutagenesis, particularly in a combinatorial setting, is an attractive method for identifying truncated forms of proteins that are bioactive.

[0612] A wide range of techniques are known in the art for screening gene products of combinatorial libraries made by point mutations and truncations, and for screening cDNA libraries for gene products having a certain property. Such techniques will be generally adaptable for rapid screening of the gene libraries generated by the combinatorial mutagenesis of protein homologs. The most widely used techniques for screening large gene libraries typically comprises cloning the gene library into replicable expression vectors, transforming appropriate cells with the resulting library of vectors, and expressing the combinatorial genes under conditions in which detection of a desired activity facilitates relatively easy isolation of the vector encoding the gene whose product was detected. Each of the illustrative assays described below are amenable to high throughput analysis as necessary to screen large numbers of degenerate sequences created by combinatorial mutagenesis techniques.

[0613] In an illustrative embodiment of a screening assay, candidate combinatorial gene products are displayed on the surface of a cell and the ability of particular cells or viral particles to bind to the combinatorial gene product is detected in a “panning assay”. For instance, the gene library may be cloned into the gene for a surface membrane protein of a bacterial cell (Ladner et al., WO 88/06630; Fuchs et al., (1991) Bio/Technology 9:1370-1371; and Goward et al., (1992) TIBS 18:136-140), and the resulting fusion protein detected by panning, e.g. using a fluorescently labeled molecule which binds the cell surface protein, e.g. FITC-substrate, to score for potentially functional homologs. Cells may be visually inspected and separated under a fluorescence microscope, or, when the morphology of the cell permits, separated by a fluorescence-activated cell sorter. This method may be used to identify substrates or other polypeptides that can interact with a polypeptide of the invention.

[0614] In similar fashion, the gene library may be expressed as a fusion protein on the surface of a viral particle. For instance, in the filamentous phage system, foreign peptide sequences may be expressed on the surface of infectious phage, thereby conferring two benefits. First, because these phage may be applied to affinity matrices at very high concentrations, a large number of phage may be screened at one time. Second, because each infectious phage displays the combinatorial gene product on its surface, if a particular phage is recovered from an affinity matrix in low yield, the phage may be amplified by another round of infection. The group of almost identical E. coli filamentous phages M13, fd, and f1 are most often used in phage display libraries, as either of the phage gIII or gVIII coat proteins may be used to generate fusion proteins without disrupting the ultimate packaging of the viral particle (Ladner et al., PCT publication WO 90/02909; Garrard et al., PCT publication WO 92/09690; Marks et al., (1992) J. Biol. Chem. 267:16007-16010; Griffiths et al., (1993) EMBO J. 12:725-734; Clackson et al., (1991) Nature 352:624-628; and Barbas et al., (1992) PNAS USA 89:4457-4461). Other phage coat proteins may be used as appropriate.

[0615] The invention also provides for reduction of the polypeptides of the invention to generate mimetics, e.g. peptide or non-peptide agents, which are able to mimic binding of the authentic protein to another cellular partner. Such mutagenic techniques as described above, as well as the thioredoxin system, are also particularly useful for mapping the determinants of a protein which participates in a protein-protein interaction with another protein. To illustrate, the critical residues of a protein which are involved in molecular recognition of a substrate protein may be determined and used to generate peptidomimetics that may bind to the substrate protein. The peptidomimetic may then be used as an inhibitor of the wild-type protein by binding to the substrate and covering up the critical residues needed for interaction with the wild-type protein, thereby preventing interaction of the protein and the substrate. By employing, for example, scanning mutagenesis to map the amino acid residues of a protein which are involved in binding a substrate polypeptide, peptidomimetic compounds may be generated which mimic those residues in binding to the substrate. For instance, non-hydrolyzable peptide analogs of such residues may be generated using benzodiazepine (e.g., see Freidinger et al., in Peptides: Chemistry and Biology, G. R. Marshall ed., ESCOM Publisher: Leiden, Netherlands, 1988), azepine (e.g., see Huffman et al., in Peptides: Chemistry and Biology, G. R. Marshall ed., ESCOM Publisher: Leiden, Netherlands, 1988), substituted gamma lactam rings (Garvey et al., in Peptides: Chemistry and Biology, G. R. Marshall ed., ESCOM Publisher: Leiden, Netherlands, 1988), keto-methylene pseudopeptides (Ewenson et al., (1986) J. Med. Chem. 29:295; and Ewenson et al., in Peptides: Structure and Function (Proceedings of the 9th American Peptide Symposium) Pierce Chemical Co. Rockland, Ill., 1985), β-turn dipeptide cores (Nagai et al., (1985) Tetrahedron Lett 26:647; and Sato et al., (1986) J Chem Soc Perkin Trans 1:1231), and β-aminoalcohols (Gordon et al., (1985) Biochem Biophys Res Commun 126:419; and Dann et al., (1986) Biochem Biophys Res Commun 134:71).

[0616] The activity of a polypeptide of the invention may be identified and/or assayed using a variety of methods well known to the skilled artisan. For example, information about the activity of non-essential genes may be assayed by creating a null mutant strain of bacteria expressing a mutant form of, or lacking expression of, a protein of interest. The resulting phenotype of the null mutant strain may provide information about the activity of the mutated gene product. Essential genes may be studied by creating a bacterial strain with a conditional mutation in the gene of interest. The bacterial strain may be grown under permissive and non-permissive conditions and the change in phenotype under the non-permissive conditions may be used to identify and/or assay the activity of the gene product.

[0617] In an alternative embodiment, the activity of a protein may be assayed using an appropriate substrate or binding partner or other reagent suitable to test for the suspected activity. For catalytic activity, the assay is typically designed so that the enzymatic reaction produces a detectable signal. For example, mixture of a kinase with a substrate in the presence of ³²P will result in incorporation of the ³²P into the substrate. The labeled substrate may then be separated from the free ³²P and the presence and/or amount of radiolabeled substrate may be detected using a scintillation counter or a phosphorimager. Similar assays may be designed to identify and/or assay the activity of a wide variety of enzymatic activities. Based on the teachings herein, the skilled artisan would readily be able to develop an appropriate assay for a polypeptide of the invention.

[0618] In another embodiment, the activity of a polypeptide of the invention may be determined by assaying for the level of expression of RNA and/or protein molecules. Transcription levels may be determined, for example, using Northern blots, hybridization to an oligonucleotide array or by assaying for the level of a resulting protein product. Translation levels may be determined, for example, using Western blotting or by identifying a detectable signal produced by a protein product (e.g., fluorescence, luminescence, enzymatic activity, etc.). Depending on the particular situation, it may be desirable to detect the level of transcription and/or translation of a single gene or of multiple genes.

[0619] Alternatively, it may be desirable to measure the overall rate of DNA replication, transcription and/or translation in a cell. In general this may be accomplished by growing the cell in the presence of a detectable metabolite which is incorporated into the resultant DNA, RNA, or protein product. For example, the rate of DNA synthesis may be determined by growing cells in the presence of BrdU which is incorporated into the newly synthesized DNA. The amount of BrdU may then be determined histochemically using an anti-BrdU antibody.

[0620] In general, the polypeptides of the invention are expected to be involved in bacterial viability. The expected biological activity of certain of the polypeptides of the invention is indicated in the following table, as described in further detail below.

| | | | Gene | | |
|---|---|---|---|---|---|
| | | | Des- | | |
| | Bacterial | Protein | igna- | COG | COG ID |
| SEQ ID NOS | Species | Annotation | tion | Category | Number |
| SEQ ID NO: 5 | S. aureus | lysyl-tRNA | lysS | translation, | COG1190 |
| SEQ ID NO: 7 | | synthetase | | ribosomal | |
| | | | | structure and | |
| | | | | biogenesis | |
| SEQ ID NO: 14 | S. | valine tRNA | valS | translation, | COG0525 |
| SEQ ID NO: 16 | pneumoniae | synthetase | | ribosomal | |
| | | | | structure and | |
| | | | | biogenesis | |
| SEQ ID NO: 23 | S. | aspartate tRNA | aspS | translation, | COG0173 |
| SEQ ID NO: 25 | pneumoniae | synthetase | | ribosomal | |
| | | | | structure and | |
| | | | | biogenesis | |
| SEQ ID NO: 32 | H. pylori | cysteine tRNA | cysS | translation, | COG0215 |
| SEQ ID NO: 34 | | synthetase | | ribosomal | |
| | | | | structure and | |
| | | | | biogenesis | |
| SEQ ID NO: 41 | P. aeruginosa | malonyl-CoA- | fabD | lipid | COG0331 |
| SEQ ID NO: 43 | | [acyl-carrier- | | metabolism | |
| | | protein] | | | |
| | | transacylase | | | |
| SEQ ID NO: 50 | H. pylori | glutamate | gltX | translation, | COG0008 |
| SEQ ID NO: 52 | | tRNA | | ribosomal | |
| | | synthetase, | | structure and | |
| | | catalytic | | biogenesis | |
| | | subunit | | | |
| SEQ ID NO: 59 | P. aeruginosa | protein chain | infA | translation, | COG0361 |
| SEQ ID NO: 61 | | initiation factor | | ribosomal | |
| | | IF-1 | | structure and | |
| | | | | biogenesis | |
| SEQ ID NO: 68 | S. | translation | infC | translation, | COG0290 |
| SEQ ID NO: 70 | pneumoniae | initiation factor | | ribosomal | |
| | | IF-3 | | structure and | |
| | | | | biogenesis | |
| SEQ ID NO: 77 | S. | threonine | thrS | translation, | COG0441 |
| SEQ ID NO: 79 | pneulnoniae | tRNA | | ribosomal | |
| | | synthetase | | structure and | |
| | | | | biogenesis | |
| SEQ ID NO: 86 | H. pylori | conserved | yaeS | lipid | COG0020 |
| SEQ ID NO: 88 | | hypothetical | | metabolism | |
| | | protein | | | |
| SEQ ID NO: 95 | E. coli | cysteine tRNA | cysS | translation, | COG0215 |
| SEQ ID NO: 97 | | synthetase | | ribosomal | |
| | | | | structure and | |
| | | | | biogenesis | |
| SEQ ID NO: 104 | H. pylori | DNA | dnaN | DNA | COG0592 |
| SEQ ID NO: 106 | | polymerase III, | | replication, | |
| | | beta-subunit | | recombination | |
| | | | | and repair | |
| SEQ ID NO: 113 | S. | 3-oxoacyl- | fabF | lipid | COG0304 |
| SEQ ID NO: 115 | pneumoniae | [acyl-carrier- | | metabolism | |
| | | protein] | | | |
| | | synthase II | | | |
| SEQ ID NO: 122 | H. pylori | methionine | map | translation, | COG0024 |
| SEQ ID NO: 124 | | aminopeptidase | | ribosomal | |
| | | | | structure and | |
| | | | | biogenesis | |
| SEQ ID NO: 131 | S. | pyruvate | pykA | carbohydrate | COG0469 |
| SEQ ID NO: 133 | pneumoniae | kinase | | transport and | |
| | | | | metabolism | |
| SEQ ID NO: 140 | H. pylori | threonine | thrS | translation, | COG0441 |
| SEQ ID NO: 142 | | tRNA | | ribosomal | |
| | | synthetase | | structure and | |
| | | | | biogenesis | |
| SEQ ID NO: 149 | P. aeruginosa | putative ATP- | ycfV | general | COG1136 |
| SEQ ID NO: 151 | | binding | | function | |
| | | component of a | | | |
| | | transport | | | |
| | | system | | | |
| SEQ ID NO: 158 | S. | glucose-6- | zwf | carbohydrate | COG0364 |
| SEQ ID NO: 160 | pneumoniae | phosphate | | transport and | |
| | | dehydrogenase | | metabolism | |
| SEQ ID NO: 167 | S. | alanyl-tRNA | alaS | translation, | COG0013 |
| SEQ ID NO: 169 | pneumoniae | synthetase | | ribosomal | |
| | | | | structure and | |
| | | | | biogenesis | |
| SEQ ID NO: 176 | S. | glutamate | gltX | translation, | COG0008 |
| SEQ ID NO: 178 | pneumoniae | tRNA | | ribosomal | |
| | | synthetase, | | structure and | |
| | | catalytic | | biogenesis | |
| | | subunit | | | |
| SEQ ID NO: 185 | S. | isoleucine | ileS | translation, | COG0060 |
| SEQ ID NO: 187 | pneumoniae | tRNA | | ribosomal | |
| | | synthetase | | structure and | |
| | | | | biogenesis | |
| SEQ ID NO: 194 | S. | RNA | rpoC | transcription | COG0086 |
| SEQ ID NO: 196 | pneumoniae | polymerase | | | |
| | | beta-prime | | | |
| | chain | | | | |
| SEQ ID NO: 203 | S. | RNA | rpoD | transcription | COG0568 |
| SEQ ID NO: 205 | pneumoniae | polymerase | | | |
| | | sigma-70 | | | |
| | | factor | | | |
| SEQ ID NO: 212 | S. | transketolase 1 | tktA | carbohydrate | COG0021 |
| SEQ ID NO: 214 | pneumoniae | isozyme | | transport and | |
| | | | | metabolism | |
| SEQ ID NO: 221 | P. aeruginosa | tryptophan | trpS | translation, | COG0180 |
| SEQ ID NO: 223 | | tRNA | | ribosomal | |
| | | synthetase | | structure and | |
| | | | | biogenesis | |
| SEQ ID NO: 230 | E. faecalis | holo-(acyl- | acpS | lipid | COG0736 |
| SEQ ID NO: 232 | | carrier protein) | | metabolism | |
| | | synthase | | | |
| SEQ ID NO: 239 | E. faecalis | glutamate | murl | cell | COG0796 |
| SEQ ID NO: 241 | | racemase | | membrane | |
| | | | | biogenesis | |
| SEQ ID NO: 248 | S. | glutamate | murl | cell | COG0796 |
| SEQ ID NO: 250 | pneumoniae | racemase | | membrane | |
| | | | | biogenesis | |
| SEQ ID NO: 257 | E. faecalis | ribonuceloside | nrdE | nucleotide | COG0209 |
| SEQ ID NO: 259 | | diphosphate | | transport and | |
| | | reductase alpha | | metabolism | |
| | | subunit | | | |
| SEQ ID NO: 266 | E. faecalis | gamma- | proA | amino acid | COG0014 |
| SEQ ID NO: 268 | | glutamyl | | transport and | |
| | | phosphate | | metabolism | |
| | | reductase | | | |
| SEQ ID NO: 275 | E. faecalis | triosephosphate | tpiA | carbohydrate | COG0149 |
| SEQ ID NO: 277 | | isomerase | | transport and | |
| | | | | metabolism | |
| SEQ ID NO: 284 | S. | triosephosphate | tpiA | carbohydrate | COG0149 |
| SEQ ID NO: 286 | pneumoniae | isomerase | | transport and | |
| | | | | metabolism | |
| SEQ ID NO: 293 | P. aeruginosa | branched-chain | bkdB | energy | COG0508 |
| SEQ ID NO: 295 | | alpha-keto acid | | production | |
| | | dehydrogenase | | and | |
| | | | | conversion | |
| SEQ ID NO: 302 | E. faecalis | tetrahydrodipic- | dapD | amino acid | COG2171 |
| SEQ ID NO: 304 | | olinate | | transport and | |
| | | (THDP) N- | | metabolism | |
| | | succinyltrans- | | | |
| | | ferase | | | |
| SEQ ID NO: 311 | P. aeruginosa | elongation | efp | translation, | COG0231 |
| SEQ ID NO: 313 | | factor P (EF-P) | | ribosomal | |
| | | | | structure and | |
| | | | | biogenesis | |
| SEQ ID NO: 320 | E. faecalis | fructose- | fbaA | carbohydrate | COG0191 |
| SEQ ID NO: 322 | | bisphosphate | | transport and | |
| | | aldolase | | metabolism | |
| SEQ ID NO: 329 | E. faecalis | isopentenyl | fri | energy | COG1304 |
| SEQ ID NO: 331 | | diphosphate | | production | |
| | | isomerase | | and | |
| | | | | conversion | |
| SEQ ID NO: 338 | E. faecalis | glutamate | gdhA | amino acid | COG0334 |
| SEQ ID NO: 340 | | dehydrogenase | | transport and | |
| | | | | metabolism | |
| SEQ ID NO: 347 | S. | GroEL protein | groEL | post- | COG0459 |
| SEQ ID NO. 349 | pneumornae | | | translational | |
| | | | | modification, | |
| | | | | protein | |
| | | | | turnover, | |
| | | | | chaperones | |
| SEQ ID NO: 356 | S. aureus | ATP-binding | modF | inorganic ion | COG1119 |
| SEQ ID NO: 358 | | component of | | transport and | |
| | | molybdate | | metabolism | |
| | | transport | | | |
| | | system | | | |
| SEQ ID NO: 365 | P. aeruginosa | DNA | parC | DNA | COG0188 |
| SEQ ID NO: 367 | | topoisomerase | | replication, | |
| | | IV subunit A | | recombination | |
| | | | | and repair | |
| SEQ ID NO: 374 | S. | GTP | ribA | coenzyme | COG0108 |
| SEQ ID NO: 376 | pneumoniae | cyclohydrolase | | metabolism | |
| | | II | | | |
| SEQ ID NO: 383 | E. faecalis | putative | usg | amino acid | COG0136 |
| SEQ ID NO: 385 | | aspartate- | | transport and | |
| | | semialdehyde | | metabolism | |
| | | dehydrogenase | | | |
| SEQ ID NO: 392 | H. pylori | elongation | efp | translation, | COG0231 |
| SEQ ID NO: 394 | | factor P (EF-P) | | ribosomal | |
| | | | | structure and | |
| | | | | biogenesis | |
| SEQ ID NO: 401 | S. aureus | GroES protein | groES | posttranslation | COG0234 |
| SEQ ID NO: 403 | | | | modification/ | |
| | | | | chaperones | |
| SEQ ID NO: 410 | P. aeruginosa | GroES protein | groES | posttranslation | COG0234 |
| SEQ ID NO: 412 | | | | modification/ | |
| | | | | chaperones | |
| SEQ ID NO: 419 | H. pylori | GroES protein | groES | posttranslation | COG0234 |
| SEQ ID NO: 421 | | | | modification/ | |
| | | | | chaperones | |
| SEQ ID NO: 428 | E. coli | transcription | nusG | transcription | COG0250 |
| SEQ ID NO: 430 | | termination | | | |
| | | factor NusG | | | |
| SEQ ID NO: 437 | S. aureus | GrpE protein | grpE | posttranslation | COG0576 |
| SEQ ID NO: 439 | | | | modification/ | |
| | | | | chaperones | |
| SEQ ID NO: 446 | H. pylori | transcription | nusG | transcription | COG0250 |
| SEQ ID NO: 448 | | termination | | | |
| | | factor NusG | | | |
| SEQ ID NO: 455 | S. | transcription | nusG | transcription | COG0250 |
| SEQ ID NO: 457 | pneumoniae | termination | | | |
| | | factor NusG | | | |
| SEQ ID NO: 464 | H. pylori | DNA-directed | rpoA | transcription | COG0202 |
| SEQ ID NO: 466 | | RNA | | | |
| | | polymerase, | | | |
| | | alpha subunit | | | |
| SEQ ID NO: 473 | S. aureus | DNA-directed | rpoA | transcription | COG0202 |
| SEQ ID NO: 475 | | RNA | | | |
| | | polymerase, | | | |
| | | alpha subunit | | | |
| SEQ ID NO: 482 | H. pylori | prolyl-tRNA | proS | translation | COG0442 |
| SEQ ID NO: 484 | | synthetase | | | |
| SEQ ID NO: 491 | S. | seryl-tRNA | serS | translation | COG0172 |
| SEQ ID NO: 493 | pneumoniae | synthetase | | | |
| SEQ ID NO: 500 | P. aeruginosa | L-cysteine | iscS | amino acid | COG1104 |
| SEQ ID NO: 502 | | desulfurase | | transport and | |
| | | | | metabolism | |
| SEQ ID NO: 536 | S. aureus | adenylate | adk | nucleotide | COG0563 |
| SEQ ID NO: 538 | | kinase | | transport and | |
| | | | | metabolism | |
| SEQ ID NO: 545 | H. pylori | UDP-N- | glmU | cell wall/ | COG1207 |
| SEQ ID NO: 547 | | acetylglucos- | | membrane | |
| | | amine | | biogenesis | |
| | | pyrophosphory- | | | |
| | | lase (glmU) | | | |
| SEQ ID NO: 554 | E. coli | geranyltranstrans- | ispA | coenzyme | COG0142 |
| SEQ ID NO: 556 | | ferase | | metabolism | |
| | | (farnesyldiphos- | | | |
| | | phate synthase) | | | |
| SEQ ID NO: 563 | H. pylori | enoyl-(acyl- | fabI | lipid | COG0623 |
| SEQ ID NO: 565 | | carrier-protein) | | metabolism | |
| | | reductase | | | |
| | | (NADH) | | | |
| SEQ ID NO: 572 | H. pylori | ribonucleoside | nrdB | nucleotide | COG0208 |
| SEQ ID NO: 574 | | diphosphate | | transport and | |
| | | reductase, beta | | metabolism | |
| | | subunit | | | |

The foregoing annotations were determined in accordance with the procedure described in EXAMPLE 17. Other biological activities of polypeptides of the invention are described herein, or will be reasonably apparent to those skilled in the art in light of the present disclosure.

[0621] A more detailed description of the biological activity for each of the polypeptides specified in the table above is set forth immediately below:

[0622] Several of the polypeptides specified in the table are aminoacyl-tRNA-synthetases. Proteins may be encoded by a DNA or RNA template. Amino acids have been observed to be activated and transported to the ribosome via attachment to tRNA, an adaptor molecule. Amino acid activation and subsequent linkage to tRNA appear to be catalyzed by aminoacyl-tRNA synthetases. When a tRNA molecule recognizes its correct codon on the ribosome bound mRNA, the attached amino acid is released and added onto the growing polypeptide chain, apparently regardless of the amino acid identity. Thus, while tRNA may recognize the correct codon on the mRNA, tRNA itself does not appear to be responsible for ensuring that the correct amino acid is attached to it, but rather the aminoacyl-tRNA synthetases.

[0623] In aminoacyl-tRNA synthetases, the acylation site has been observed as the site where amino acid substrates are bound, activated, and attached to tRNA. The aminoacyl-tRNA synthetase catalyzed aminoacylation of tRNA has been observed to proceed through two steps. First, ATP appears to activate the amino acid, forming an enzyme-bound aminoacyl-adenylate intermediate and inorganic pyrophosphate. Secondly, the amino acid moiety may be transferred to either the 2′OH or 3′OH of the terminal adenosine of the tRNA molecule to generate aminoacyl-tRNA and AMP.

[0624] In addition to the acylation site, most aminoacyl-tRNA synthetases appear to contain a hydrolytic site. Acylation sites apparently reject amino acid substrates that are larger than the correct amino acid substrate because there is insufficient room in the acylation site for the amino acids to bind, be activated, and become attached to tRNA. Hydrolytic sites appear to destroy activated intermediates that are smaller than the correct activated intermediate. However, some aminoacyl-tRNA synthetases do not have a hydrolytic site, and instead appear to discriminate between correct and incorrect amino acids via another mechanism. The appropriate tRNA substrate may be recognized by the aminoacyl-tRNA synthetases in several ways, such as via the anticodon loop, acceptor stem, or another unique identifying characteristic. By their apparent selectivity in recognition of both the amino acid substrates and the prospective tRNA acceptors, aminoacyl-tRNA synthetases are throught to establish the basis for the fidelity of protein synthesis from a nucleic acid template.

[0625] Because aminoacyl-tRNA synthetases appear to be universal and essential for cell viability, potent aminoacyl-tRNA synthetase inhibitors that are also selective for pathogens may be very attractive drug targets. The world's most widely used topical antibiotic, mupirocin, is an aminoacyl-tRNA synthetase inhibitor. Mupirocin inhibits eubacterial and archaeal isoleucyl-tRNA synthetases, but is 1000-fold less potent against eukaryotic isoleucyl-tRNA synthetase. Mupirocin illustrates the clinical application of a potent, highly selective bacterial aminoacyl-tRNA synthetase inhibitor.

[0626] A detailed description for the specific aminoacyl-tRNA-synthetases specified in the table above is as follows.

[0627] With respect to SEQ ID NO: 5 and SEQ ID NO: 7 from S. aureus, the protein annotation is lysyl-tRNA synthetase, with gene designation of lysS. In Escherichia coli, the constitutive aminoacyl-tRNA synthetase that attaches lysine to its appropriate tRNA is lysyl-tRNA synthetase. Lysyl-tRNA synthetase is a homodimeric, class IIb aminoacyl-tRNA synthetase. The crystal structure of E. coli lysyl-tRNA synthetase was solved at 2.7 Å resolution, and its complex with L-lysine was also solved at 2.7 Å resolution. Crystal structures of other aminoacyl-tRNA synthetases from E. coli and other pathogens may prove useful in the design of such inhibitors.

[0628] With respect to SEQ ID NO: 14 and SEQ ID NO: 16 from S. pneumnoniae, the protein annotation is valine tRNA synthetase, with gene designation of valS. In Escherichia coli, the aminoacyl-tRNA synthetase that attaches valine to its appropriate tRNA is valyl-tRNA synthetase. Valyl-tRNA synthetase has been observed as a monomeric, class Ia aminoacyl-tRNA synthetase. The crystal structure of Thermus thermophilus valyl-tRNA synthetase complexed with both tRNA Val and N-(L-valyl)-N′-adenosyl-diaminosulfone was solved at 2.9 A resolution.

[0629] With respect to SEQ ID NO: 23 and SEQ ID NO: 25 from S. pneumoniae, the protein annotation is aspartate tRNA synthetase, with gene designation of aspS. In Escherichia coli, the aminoacyl-tRNA synthetase that attaches aspartic acid to its appropriate tRNA is aspartyl-tRNA synthetase. Aspartyl-tRNA synthetase has been observed as a dimeric, class IIb aminoacyl-tRNA synthetase in several structure determinations. A crystal structure of Thermus thermophilus aspartyl-tRNA synthetase complexed with Thermus thermophilus or Escherichia coli tRNAAsp was solved at 3.5 and 3.0 Å, respectively. The crystal structure of E. coli aspartyl-tRNA synthetase complexed with Saccharomyces cerevisiae tRNAAsp was solved at 2.6 Å resolution. Furthermore, the E. coli aspartyl-tRNA synthetase crystal complexed with both tRNAAsp and aspartyl-adenylate was solved at 2.6 Å resolution. Finally, the Pyrococcus kodakaraensis aspartyl-tRNA synthetase crystal was solved at 1.9 Å resolution.

[0630] With respect to SEQ ID NO: 32 and SEQ ID NO: 34 from H. pylori, the protein annotation is cysteine tRNA synthetase, with gene designation of cysS. Further, with respect to SEQ ID NO: 95 and SEQ ID NO: 97 from E. coli, the protein annotation is cysteine tRNA synthetase, with gene designation of cysS. In Escherichia coli, the aminoacyl-tRNA synthetase that attaches cysteine to its appropriate tRNA is cysteinyl-tRNA synthetase. Cysteinyl-tRNA synthetase has been observed as a monomeric, class Ia aminoacyl-tRNA synthetase.

[0631] With respect to SEQ ID NO: 50 and SEQ ID NO: 52 from H. pylori, the protein annotation is glutamate tRNA synthetase, catalytic subunit, with gene designation of gltX. Further, with respect to SEQ ID NO: 176 and SEQ ID NO: 178 from S. pneumoniae, the protein annotation is glutamate tRNA synthetase, catalytic subunit, with gene designation of gltX. In Streptococcus pneumoniae and Helicobacter pylori, the catalytic subunit of glutamate tRNA synthetase is encoded by the gltX gene, which appears essential for cell viability and conserved.

[0632] With respect to SEQ ID NO: 77 and SEQ ID NO: 79 from S. pneumoniae, the protein annotation is threonine tRNA synthetase, with gene designation of thrS. Further, with respect to SEQ ID NO: 140 and SEQ ID NO: 142 from H. pylori, the protein annotation is threonine tRNA synthetase, with gene designation of thrS. In bacteria, the aminoacyl-tRNA synthetase that attaches threonine to its appropriate tRNA is threonyl-tRNA synthetase. In Gram-positive bacteria, such as Bacillus subtilis, two threonyl-tRNA synthetase genes, thrS (housekeeping) and thrZ (inducible), are observed. Threonyl-tRNA synthetase has been observed as a homodimeric, class II aminoacyl-tRNA synthetase. The crystal structure of Escherichia coli threonyl-tRNA synthetase complexed with tRNA-Thr was solved at 2.9 A resolution.

[0633] With respect to SEQ ID NO: 167 and SEQ ID NO: 169 from S. pneumoniae, the protein annotation is alanyl-tRNA synthetase, with gene designation of alaS. In Escherichia coli, the aminoacyl-tRNA synthetase that attaches alanine to its appropriate tRNA is alanyl-tRNA synthetase. Alanyl-tRNA synthetase has been observed as a homotetrameric, class II aminoacyl-tRNA synthetase.

[0634] With respect to SEQ ID NO: 185 and SEQ ID NO: 187 from S. pneumoniae, the protein annotation is isoleucine tRNA synthetase, with gene designation of ileS. In Escherichia coli, the aminoacyl-tRNA synthetase that attaches isoleucine to its appropriate tRNA is isoleucyl-tRNA synthetase. Isoleucyl-tRNA synthetase has been observed as a monomeric, class Ia aminoacyl-tRNA synthetase. Several crystal structures of Thermus thermophilus isoleucyl-tRNA synthetase complexed with various compounds have been solved: a complex with pseudomonic acid A was solved at 2.6 Å resolution, a complex with mupirocin (pseudomonic acid A) at 3 Å resolution, and a complex with 5′-N—[N-(L-isoleucyl)sulfamoyl]adenosine at 2.5 Å resolution. Isoleucyl-tRNA synthetase inhibitors such as mupirocin, isovanillic hydroxamate, and certain novel thiazoles, have exceptionally tight observed binding affinities, potentially increasing their potencies as inhibitors.

[0635] A detailed description of the biological activity for each of the remainder of the polypeptides specified in the table above that are not aminoacyl-tRNA-synthetases is as follows:

[0636] With respect to SEQ ID NO: 41 and SEQ ID NO: 43 from P. aeruginosa, the protein annotation is malonyl-CoA-[acyl-carrier-protein] transacylase, with gene designation of fabD. Further, with respect to SEQ ID NO: 113 and SEQ ID NO: 115 from S. pneumoniae, the protein annotation is 3-oxoacyl-[acyl-carrier-protein] synthase II, with gene designation of fabF. Fatty acid biosynthesis appears to be carried out by the ubiquitous fatty-acid synthase (FAS) system. The first step in the fatty acid biosynthetic cycle appears to be the condensation of malonyl-acyl carrier protein (or “malonyl-ACP”) with acetyl-CoA by FabH. Prior to this, malonyl-ACP appears to be synthesized from ACP and malonyl-CoA by FabD, malonyl CoA:ACP transacylase. In subsequent rounds, malonyl-ACP may be condensed with the growing-chain acyl-ACP. The second step in the elongation cycle appears to be ketoester reduction by NADPH-dependent beta.-ketoacyl-ACP reductase (FabG). Subsequent dehydration by beta.-hydroxyacyl-ACP dehydrase (either FabA or FabZ) may leads to trans-2-enoyl-ACP, which in turn may be converted to acyl-ACP by enoyl-ACP reductase (FabI). Further rounds of this cycle, adding two carbon atoms per cycle, eventually lead to palmitoyl-ACP, whereupon the cycle may be inhibited by feedback inhibition of FabH and FabI by palmitoyl-ACP.

[0637] Yeast and vertebrates generally employ the type I FAS system, whereby fatty acid biosynthesis has been observed to proceed via a single multifunctional polypeptide complex. In contrast, in most bacteria and plants a type II FAS system is employed, wherein each of the reactions may be catalyzed by distinct monofunctional enzymes and the ACP is a discrete protein. Thus, there appears to be considerable potential for selective inhibition of the bacterial FAS systems. The absolute requirement of type II FAS for bacterial viability, together with its major differences from the mammalian system, suggests that enzymes in this pathway may be good targets for broad spectrum antibacterial compounds. The protein encoded by fabD from Pseudomonas aeruginosa has been observed to be one of the enzymes in this pathway. The protein encoded by fabF from Streptococcus pneumoniae is one of the enzymes in this pathway.

[0638] With respect to SEQ ID NO: 59 and SEQ ID NO: 61 from P. aeruginosa, the protein annotation is protein chain initiation factor IF-1, with gene designation of infA. Further, with respect to SEQ ID NO: 68 and SEQ ID NO: 70 from S. pneumoniae, the protein annotation is translation initiation factor IF-3, with gene designation of infC. Initiation of protein biosynthesis in bacteria has been observed to depend on the presence of various factors, including mRNA, fMet-tRNA, GTP, as well the presence of at least three proteins; initiation factors IF1, IF2, and IF3, encoded by infA, infB and infC. Besides being highly conserved elements of bacterial translational machinery, the genes infA and infC are to be essential for cell viability in E. coli.

[0639] Recent evidence suggests that IF1 is an RNA-binding protein associated with the A site of the decoding region of 16 S rRNA. The structure of IF1 has been determined using NMR spectroscopy. The structure revealed a fold similar to cold shock proteins and other proteins that are known to contain nucleic acid binding motifs. Another structure of IF1 bound to the 30S ribosomal subunit suggests the possible function of this factor. Finally, the structure of 1F1 from an archaebacterium further supports the notion that the protein's fold is similar to the OB-fold family of single stranded nucleic acid binding proteins.

[0640] IF3 is twice as large as IF1, and appears to be composed of two domains that are separated by a flexible linker. The x-ray crystal structures of two IF3 domains from Bacillus stearothermophilus have been solved, revealing an alpha/beta topology with an exposed beta-sheet, similar to that observed in several ribosomal and RNA binding proteins. Of the two domains, it is believed that the C-terminal domain is required for IF3 to function via association with the 30S ribosome site.

[0641] With respect to SEQ ID NO: 86 and SEQ ID NO: 88 from H. pylori, the protein annotation is conserved hypothetical protein, with gene designation of yaeS. The protein encoded by the gene yaeS has been observed to be essential for cell viability. Furthermore, the protein encoded by this gene appears highly conserved among a wide number of bacterial species, both Gram-positive and -negative.

[0642] With respect to SEQ ID NO: 104 and SEQ ID NO: 106 from H. pylori, the protein annotation is DNA polymerase III, beta-subunit, with gene designation of dnaN. Replication of DNA in prokaryotes is a highly processive process that is believed to require DNA polymerase III subunit beta. DNA polymerase III subunit beta is a component of the DNA replication holoenzyme and is thought to form a sliding clamp on the DNA template. This protein also has been demonstrated to interact with the DNA repair machinery, including DNA polymerase V through genetics analysis. Mutagenic agents as well as UV exposure have also linked DNA polymerase III beta subunit to DNA repair through the co-induction of DNA polymerase III beta subunit and the DNA repair factor recF.

[0643] DNA mechanism for synthesis in prokaryotes has been well documented and is believed to proceed by the following mechanism. DnaA binds to the oriC replication initiation sequence, and recruits a dimeric complex of dnaB and dnaC to the oriC site. DnaB is an ATP dependent helicase that initiates the unwinding of the DNA strands. The separated DNA strands are bound and stabilized by single strand DNA binding protein SSB. Following dissociation of the DNA strands, an RNA primer is synthesized by primase, allowing for the synthesis of the nascent DNA strands. DNA polymerase I (single subunit enzyme) is responsible for synthesis of DNA on the lagging strand in approximately 20 base segments, and DNA polymerase III (multi subunit enzyme comprised of alpha, beta, epsilon, theta, tau, gamma, delta, and delta′) in conjunction with the rep helicase are responsible for processive synthesis of DNA on the leading strand. The RNA primers are subsequently removed by DNA polymerase I and newly synthesized DNA is introduced in its place. The junction of newly synthesized DNA molecules created by DNA polymerase I are ligated by DNA ligase to complete the replication cycle.

[0644] With respect to SEQ ID NO: 122 and SEQ ID NO: 124 from H. pylori, the protein annotation is methionine aminopeptidase, with gene designation of map. The removal of the N-terminal methionine residue is believed to be carried out by the metalloenzyme methionine peptidase, encoded by the map gene. The removal of this N-terminal amino acid has been observed to be a critical step in the maturation of many proteins and appears to be required for biological activity, proper subcellular localization and eventual degradation. The map gene is essential for cell viability in several microorganisms, including E. coli and S. typhimurium. Methionine peptidase appears to only act on proteins if the second residue in the protein is small and uncharged, for example, glycine, alanine, proline, serine, cysteine, threonine and valine. A crystal structure of the E. coli methionine peptidase has been solved, revealing a ‘pita-bread’ fold, and a dinuclear metal binding site occupied by cobalt. The enzyme has been observed to be inhibited by two epoxide-containing natural products, fumagillin and ovalicin. These compounds have potent anti-angiogenic activity and restrict the vascularization and metastasis of tumours. These natural molecules may serve as a basis for development of other map inhibitors.

[0645] With respect to SEQ ID NO: 131 and SEQ ID NO: 133 from S. pneumoniae, the protein annotation is pyruvate kinase, with gene designation of pykA. Pyruvate kinase, encoded by the gene pykA, is an essential enzyme for cell viability that plays a vital role during glycolysis. Pyruvate kinase appears to be a highly conserved protein among both Gram positive and negative bacteria. It appears to convert P-enol-pyruvate to pyruvate in an ATP-dependent manner. In E. coli, two pyruvate isoenzymes encoded by pykA and pykF have been observed, while in Bacillus subtilis only the pykA gene has been observed to be capable of pyruvate kinase activity.

[0646] With respect to SEQ ID NO: 149 and SEQ ID NO: 151 from P. aeruginosa, the protein annotation is putative ATP-binding component of a transport system, with gene designation of ycfV. The protein encoded by the gene ycfV is essential for cell viability. Furthermore, the protein encoded by this gene appears to be conserved among a wide number of both Gram-positive and -negative bacterial species.

[0647] With respect to SEQ ID NO: 158 and SEQ ID NO: 160 from S. pneumoniae, the protein annotation is glucose-6-phosphate dehydrogenase, with gene designation of zwf. Glucose-6-phosphate dehydrogenase (G6PD) is believed to be responsible for catalyzing the initial oxidative reaction—the conversion of glucose-6-phosphate (G6P) into 6-phosphogluconolactone—in the pentose phosphate pathway (PPP). For every mole of G6PD entering the PPP cycle, one mole of NADPH and a five carbon sugar (ribose) is produced. Unlike the G6PD from Leuconostoc mesenteroides, which is believed to be capable of using either NAD+ or NADP+ as a coenzyme, the E. coli enzyme is believed to be the only enzyme that specifically uses NADP+ as a coenzyme. It has also been observed that the gene encoding the G6PD enzyme in E. coli, zwf, is essential. Further, it appears that this enzyme is conserved in numerous clinically relevant microbes.

[0648] With respect to SEQ ID NO: 194 and SEQ ID NO: 196 from S. pneumoniae, the protein annotation is RNA polymerase beta-prime chain, with gene designation of rpoC. Further, with respect to SEQ ID NO: 203 and SEQ ID NO: 205 from S. pneumoniae, the protein annotation is RNA polymerase sigma-70 factor, with gene designation of rpoD. DNA-dependent RNA polymerase (RNAP) is an essential and universally conserved protein in bacteria, and appears to be involved in the synthesis of RNA during transcription. The enzyme has been observed to catalyze phosphodiester bond formation during RNA synthesis. The enzyme comprises four subunits, with a molecular mass of around 400 kDa. Taken together, the β and the β′ subunits appear to constitute 70% of the enzyme mass and carry out most of the functions of the enzyme. Recent work has suggested that the β′ subunit is required for the formation of the binding pocket for the antibiotic Rifampicin to bind to the enzyme. The gene rpoC encodes the β′ subunit of the enzyme complex, while the the rpoD gene encodes the sigma-70 factor. Promoter recognition depends on the sigma-70 factor, which interacts with RNAP to form the holoenzyme. The crystal structure of the Thermus aquaticus RNA polymerase has been deciphered at 3.3 Å resolution. Determining the structures of RNAPs from other pathogenic microorganisms may aid in the design of novel therapeutic agents.

[0649] With respect to SEQ ID NO: 212 and SEQ ID NO: 214 from S. pneumoniae, the protein annotation is transketolase 1 isozyme, with gene designation of tktA. The pentose phosphate pathway facilitates catabolism of 5-carbon sugar phosphates by converting them into 6- and 3-carbon sugar phosphates, producing NADPH for reductive synthesis, and generating intermediates for the anabolism of amino acids, vitamins, nucleotides, and cell wall constituents. One important enzyme of the pentose phosphate pathway is the homodimeric transketolase, which catalyzes the transfer of a 2-carbon glycoaldehyde residue from a ketose to an aldose via a thiamine pyrophosphate prosthetic group. In the non-oxidative branch of the pentose phosphate pathway, ribose 5-phosphate isomerase may catalyze the rearrangement of ribulose 5-phosphate into ribose 5-phosphate. Alternatively, phosphopentose epimerase may catalyze ribulose 5-phosphate to xylulose 5-phosphate. Transketolase may then rearrange xylulose 5-phosphate and a ribose 5-phosphate to form glyceraldehyde 3-phosphate and sedoheptulose 7-phosphate. The two products may then be rearranged by transaldolase by form erythrose 4-phosphate and fructose 6-phosphate. The erythrose 4-phosphate and a xylulose 5-phosphate may be rearranged by transketolase to form glyceraldehyde 3-phosphate and fructose 6-phosphate. In this manner, the 5-carbon sugar ribulose 5-phosphate may be converted into 6- and 3-carbon sugar phosphates, which can be further metabolized via glycolysis and the citric acid cycle, or used for NADPH synthesis. For cells in which nucleotide synthesis is primarily needed, the pentose phosphate pathway produces mainly ribose 5-phosphate, and the further rearrangements of the pentose pathway do not appear to take place. The products erythrose 4-phosphate and sedoheptulose 7-phosphate may be precursors for aromatic amino acid and cell wall heptoses, respectively. In this manner, the pentose phosphate pathway may facilitate nucleotide, histidine and tryptophan synthesis, NADPH production, entry of 5-carbon sugar phosphates into the glycolytic pathway, and subsequent aromatic amino acid and cell wall heptose synthesis. In Escherichia coli, the pentose phosphate pathway is believed to be the only pathway that is able to catabolize D-xylose, D-ribose, or L-arabinose.

[0650] With respect to SEQ ID NO: 221 and SEQ ID NO: 223 from P. aeruginosa, the protein annotation is tryptophan tRNA synthetase, with gene designation of trpS. In Escherichia coli, the aminoacyl-tRNA synthetase that attaches tryptophan to its appropriate tRNA is tryptophanyl-tRNA synthetase. Tryptophanyl-tRNA synthetase has been observed as a homodimeric, class Ic aminoacyl-tRNA synthetase. The crystal structure of Bacillus stearothermophilus tryptophanyl-tRNA synthetase was solved at 2.9 Å resolution, and complexed with tryptophanyl-adenylate at 1.7 Å resolution. Further structural studies of tryptophanyl-tRNA synthetases may aid in the development of improved inhibitors and other therapeutic agents.

[0651] With respect to SEQ ID NO: 230 and SEQ ID NO: 232 from E. faecalis, the protein annotation is holo-(acyl-carfier protein) synthase, with gene designation of acpS. Panthotenic acid is known to be one of the complex B vitamins that is used primarily for synthesis of Coenzyme A (CoA) and holo-[acyl carrier protein] (ACP). ACP synthase is thought to catalyze the last step in this pathway. In particular, ACP synthase is believed to catalyze the transfer of 4′-phosphopantetine from CoA to a serine residue of acyl carrier protein to form holo-[acyl carrier protein]. The acpS-null mutation has been observed to be lethal in various organisms.

[0652] ACP synthase is believed to play a crucial role in fatty acid metabolism by providing a key coenzyme of fatty acid biosynthesis. Elongation of fatty acid chains occurs only in the presence of ACP-bound substrate. ACP synthase is also believed to catalyze the transfer of acetyl-, propionyl-, butyryl-, benzoyl-, phenylacetyl-, and malonylphosphopantetheines to apo-ACPs from their corresponding coenzyme A substrates. ACP synthase is believed to exist as a trimer and the catalytic center is thought to be located at each of the solvent-exposed interfaces between the AcpS molecules of the trimer. Site-directed mutagenesis studies confirm the importance of trimer formation in AcpS activity.

[0653] With respect to SEQ ID NO: 239 and SEQ ID NO: 241 from E. faecalis, the protein annotation is glutamate racemase, with gene designation of murI. Still further, with respect to SEQ ID NO: 248 and SEQ ID NO: 250 from S. pneumoniae, the protein annotation is glutamate racemase, with gene designation of murI. Peptidoglycan, a component of the bacterial cell wall, is thought to play a critical role in protecting bacteria against osmotic lysis. It is comprised of linearly repeating disaccharide chains cross-linked by short peptide bridges. Glutamate racemase, a product of the murI gene, has been observed to catalyze the interconversion of glutamate enantiomers in a cofactor-independent manner to provide D-glutamate required for peptidoglycan synthesis. Structural studies on glutamate racemase have indicated that two cysteines in the active site may be used as acid/base catalysts during the reaction. The crystal structure of murI from Aquifex pyrophilus has been determined to 2.3′, and reveals that the enzyme may be comprised of a dimer. Each monomer comprises two alpha/beta fold domains, which appear to have a unique fold as compared to other racemases or enolases. Glutamate racemase is essential for cell viability and is highly conserved in bacteria.

[0654] With respect to SEQ ID NO: 257 and SEQ ID NO: 259 from E. faecalis, the protein annotation is ribonuceloside diphosphate reductase alpha subunit, with gene designation of nrdE. Ribonucleoside reductase catalyses the synthesis of deoxyribonucleotide triphosphate (dNTPs) required for DNA synthesis. At least three separate classes of enzymes are known, each with a distinct structure but all requiring a protein radical for catalysis. Ribonucleoside diphosphate reductase is a Class I ribonucleotide reductase and is found in humans, yeast, and a variety of bacteria, including E. coli and S. aureus. This enzyme plays a central role in providing the monomeric precursors required for DNA biosynthesis and it also plays a central role in DNA repair.

[0655] The function of ribonucleoside diphosphate reductase is the catalysis of deoxyribonucleotides from the corresponding ribonucleotides. The specific catalytic activity is 2′-deoxyribonucleoside diphosphate+oxidized thioredoxin+H20=ribonucleoside diphosphate+reduced thioredoxin. It is regulated allosterically, at the transcriptional level, and plays a key role in checkpoint control of the cell cycle. A tyrosyl radical and diiron cluster are essential for activity, and the mechanism of this cofactor formation, has been studied extensively both in vitro and in vivo.

[0656] With respect to SEQ ID NO: 266 and SEQ ID NO: 268 from E. faecalis, the protein annotation is gamma-glutamyl phosphate reductase, with gene designation of proA. The majority of bacteria appear to synthesize proline by a four-step reaction catalyzed by gamma-glutamyl kinase (proB), gamma-glutamyl phosphate reductase (proA), and delta-pyrroline-5-carboxylate (proC). L-glutamate is converted to L-gamma-glutamyl phosphate (by proB product), which is then converted into L-gamma-glutamic semialdehyde (by the proA product). L-gamma-glutamic semialdehyde is spontaneously converted into L-delta-pyrroline-5-carboxylate in a reversible reaction, and finally L-proline is formed from L-delta-pyrroline-5-carboxylate by the action of the reductase encoded by proC.

[0657] With respect to SEQ ID NO: 275 and SEQ ID NO: 277 from E. faecalis, the protein annotation is triosephosphate isomerase, with gene designation of tpiA. Further, with respect to SEQ ID NO: 284 and SEQ ID NO: 286 from S. pneumoniae, the protein annotation is triosephosphate isomerase, with gene designation of tpiA. Glycolysis, in addition to its role as a important biological route for the metabolism of hexoses, provides the cell with intermediates of central metabolism for the synthesis of amino acids, vitamins, nucleotides, and cell wall constituents. Triose-phosphate isomerase (TPI, EC 5.3.1.1) catalyzes interconversion of glyceraldehydes-3-phosphate and dihydroxyacetone phosphate, both formed from catabolism of fructose-1,6-diphosphate. The main metabolic role for this enzyme is to convert essentially nonmetabolizing dihydroxyacetonephosphate into glyceraldehyde-3-phosphate.

[0658] With respect to SEQ ID NO: 293 and SEQ ID NO: 295 from P. aeruginosa, the protein annotation is branched-chain alpha-keto acid dehydrogenase, with gene designation of bkdB. BkdB encodes a branched-chain alpha-keto acid dehydrogenase (lipoamide component). The dehydrogenase is believed to be involved in valine degradation and appears closely related to the gene products of the bkda1 and bkdA2 genes.

[0659] With respect to SEQ ID NO: 302 and SEQ ID NO: 304 from E. faecalis, the protein annotation is tetrahydrodipicolinate (THDP) N-succinyltransferase, with gene designation of dapD. Tetrahydropicolinate (THDP) succinylase, encoded by the gene dapD, has been observed to catalyze the formation of CoA and N-succinyl-2-amino-6-keto-L-pimelate from succinyl-CoA and THDP. This-reaction comprises the committed step in the succinylase pathway by which bacteria synthesize L-lysine and mesodiaminopimelate. Mesodiaminopimelate is a component of peptidoglycan.

[0660] With respect to SEQ ID NO: 311 and SEQ ID NO: 313 from P. aeruginosa, the protein annotation is elongation factor P (EF-P), with gene designation of efp. Still further, with respect to SEQ ID NO: 392 and SEQ ID NO: 394 from H. pylori, the protein annotation is elongation factor P (EF-P), with gene designation of efp. Translation elongation factor P (EF-P) is believed to be involved in peptide bond synthesis and is known to be essential for cell viability. EF-P is thought to stimulate efficient translation and peptide bond synthesis on native or reconstituted 70S ribosomes in vitro. EF-P is postulated to catalyze the formation of the acyl bond between an incoming amino acid and the peptide chain. It is believed that EF-P functions indirectly by altering the affinity of the ribosome for aminoacyl-tRNA, thus increasing the ribosome's reactivity as an acceptor for peptidyl transferase.

[0661] EF-P is known to be homologous to the eukaryotic factor eIF-5A . EF-P has been sequenced as part of a number of bacterial genomes, some of which include: A. aeolicus, B. aphidicola, B. burgdorferi, B. fragilis, B. lactofermentum, Bacillus subtilis, E. Coli, H. influenzae, H. pylori, L. lactis, M. genitalium, M. pneumoniae, M. tuberculosis, P. multocida, R. prowazekii, S. aureus, S. pyrogenes, T. maritime, T. pallidum, and U. parvum.

[0662] EF-P protein is a promising drug target because of the essential role it plays in protein synthesis. If EF-P is inhibited, peptide bonds are not formed and thus proteins cannot be synthesized. Studies have been performed to determine if antibiotics would inhibit the stimulation of peptidyltransferase by EF-P. The following antibiotics, thiostrepton, viomycin, neomycin, and fusidic acid, which affect translocation and occupation of the A site in the elongation state, had no affect on the stimulation of peptidyltransferase by EF-P. However the catalysis effect of EF-P on peptidyltransferase was inhibited by streptomycin as well as by peptidyltransferase inhibitors (chloramphenicol and lincomycin).

[0663] With respect to SEQ ID NO: 320 and SEQ ID NO: 322 from E. faecalis, the protein annotation is fructose-bisphosphate aldolase, with gene designation of fbaA. Glycolysis is known to be a sequence of 10 enzyme-catalyzed reactions by which glucose is converted to pyruvate. Pyruvate may undergo oxidative decarboxylation to form acetyl CoA, the metabolite that enters the citric acid cycle. The citric acid cycle is the hub of aerobic metabolism and the starting point for many biosynthetic pathways. Therefore, formation of pyruvate is thought to be essential for energy metabolism, plus formation and degradation of amino acids and lipids.

[0664] The glycolytic pathway is found in virtually all cells and for some it is the only ATP-producing pathway. The second stage of glycolysis consists of four steps, starting with the splitting of fructose 1,6-bisphosphate into glyceraldehydes 3-phosphate and dihydroxyacetone phosphate. This reaction is catalyzed by fructose 1,6-bisphosphate aldolase. This enzyme derives its name from the reverse reaction, an aldol condensation. This reaction is step four of the glycolytic pathway.

[0665] Aldolases catalyze a variety of condensation and cleavage reactions, with exquisite control on the stereochemistry. These enzymes, therefore, are attractive catalysts for synthetic chemistry. There are two known classes of aldolase: class I aldolases utilize Schiff base formation with an active-site lysine, whereas class II enzymes require a divalent metal ion, in particular zinc. The mechanism of the Class II enzymes is less well understood than their Class I counterparts.

[0666] The molecular architecture of the Class II Escherichia coli fructose 1,6-bisphosphate aldolase dimer was determined to 1.6 A resolution. The subunit fold corresponds to a singly wound alpha/beta-barrel with an active site located on the beta-barrel carboxyl side of each subunit. In each subunit there are two mutually exclusive zinc metal ion binding sites, 3.2 A apart; the exclusivity is mediated by a conformational transition involving side-chain rotations by chelating histidine residues. A binding site for K+ and NH4+ activators is found near the beta-barrel center.

[0667] Although Class I and Class II aldolases catalyse identical reactions, their active sites do not share common amino acid residues, are structurally dissimilar, and from sequence comparisons appear to be evolutionary distinct. When the sequence alignments of the Class II family of enzymes and examination of the crystal structure of the enzyme are combined, potentially important aspartate and asparagine residues in the enzyme mechanism are highlighted. Mutation of Asp109 or Asn286 were observed to cause 3000-fold and 8000-fold decreases in the kcat of the reaction, respectively. Coupled with the kinetics measured for the partial reactions the results suggests a role for Asn286 in catalysis and in binding the ketonic end of the substrate. Fourier transform infra-red spectroscopy of the wild-type and mutant enzymes has further delineated the role of Asp109 as being critically involved in the polarisation of the carbonyl group of glyceraldehyde 3-phosphate.

[0668] With respect to SEQ ID NO: 329 and SEQ ID NO: 331 from E. faecalis, the protein annotation is isopentenyl diphosphate isomerase, with gene designation of fni. Isoprenoids play important roles in almost all living organisms. Steroid hormones in mammals, carotenoids in plants, and ubiquinone or menaquinone in bacteria are all examples of isoprenoids. All isoprenoids appear to be synthesized by consecutive condensations of the five-carbon precursor isopentenyl diphosphate (IPP) to its isomer dimethylallyl diphosphate (DMAPP). Two distinct pathways for this step in IPP biosynthesis have been elucidated to date. One is the mevalonate pathway that has been observed in eukaryotes, archaebacteria, and the cytosols of higher plants. Another is the nonmevalonate pathway which has been observed in many eubacteria, including Escherichia coli and Bacillus subtilis, green algae, and the chloroplasts of higher plants.

[0669] IPP isomerase (EC 5.3.3.2) appears to catalyze the conversion of IPP to DMAPP. Many IPP isomerase genes (idi) have been cloned from various sources such as humans, Saccharomyces cerevisiae, E. coli, and Rhodobacter capsulatus. However, database searches using the highly conserved amino acid sequences in IPP isomerases identified to date do not detect IPP isomerase in archaebacteria and some eubacteria that possess the mevalonate pathway. This indicates that an unusual type of IPP isomerase may exist in organisms that possess the mevalonate pathway. The IPP isomerases may be classified into two types: Type 2 for FMN- and NAD(P)H-dependent enzymes, and Type 1 for the others. Type 2 IPP isomerases do not belong to any known category of flavoprotein. In Type 1 IPP isomerases, the isomerization of IPP proceeds via a carbocationic intermediate. The mechanism of Type 1 IPP isomerases appears to proceed as follows. The IPP double bond is electrophilically attacked by a proton from water, which yields the carbocationic intermediate, after which the C-2 pro-R hydrogen of the intermediate is stereospecifically eliminated. The Type 2 mechanism, which is not yet known, may proceed by a similar mechanism in which a carbocationic intermediate may also be involved.

[0670] Unlike most gram-negative bacteria and Bacillus subtilis, species of enterococci, staphylococci, and streptococci possess homologs of five genes predicted to encode enzymes involved in the mevalonate route to IPP, rather than the nonmevalonate route. Genetic disruption experiments indicate that the five genes encoding proteins involved in this pathway (HMG-CoA synthase, HMG-CoA reductase, mevalonate kinase, phosphomevalonate kinase, and mevalonate diphosphate decarboxylase) are essential for the in vitro growth of Streptococcus pneumoniae under standard conditions. Each of the five genes of the mevalonate pathway appears essential for the growth of Streptococcus pneumoniae in vitro in the absence of mevalonate. This gene cluster has also been observed in Streptomyces sp. strain CL190. Furthermore, an E coli strain transformed with this gene cluster was observed to contain a functioning mevalonate pathway.

[0671] In addition to the genes of the mevalonate pathway, the gene cluster appears to contain additional open reading frames, which have been ascribed to an uncharacterized type of IPP isomerase. This gene, known as the fni gene, which encodes FMN- and NAD(P)H-dependent IPP isomerase, has recently been detected in some archaebacteria and some Gram-positive bacteria, including Staphylococcus aureus, Streptococcus pneumoniae, Streptococcus pyrogenes, and Enterococcus faecalis. The recombinant product of fni from Streptomyces has been purified as a soluble protein and characterized. The molecular mass of the enzyme was estimated to be 37 kDa by SDS-polyacrylamide gel electrophoresis and 155 kDa by gel filtration chromatography, suggesting that the enzyme is most likely a tetramer. The purified enzyme contained flavin mononucleotide (FMN) in an amount per tetramer estimated at 1.4 to 1.6 mol/mol. The enzyme appears to catalyze the isomerization of isopentenyl diphosphate (IPP) to produce dimethylallyl diphosphate (DMAPP) in the presence of both FMN and NADPH.

[0672] With respect to SEQ ID NO: 338 and SEQ ID NO: 340 from E. faecalis, the protein annotation is glutamate dehydrogenase, with gene designation of gdhA. Glutamate dehydrogenase, encoded by gdhA, has been observed to synthesize glutamate from alpha-ketoglutarate, particularly during energy-limited growth. Recent work has characterized the expression levels of the enzyme and its stability in exponentially-growing cells. A preliminary x-ray diffraction analysis of gdhA from an aerobic hyperthermophilic archaeon, Aeropyrum pernix, was performed.

[0673] With respect to SEQ ID NO: 347 and SEQ ID NO: 349 from S. pneumoniae, the protein annotation is GroEL protein, with gene designation of groEL. Structure/function studies have been performed with the E. coli hsp60 homologue, GroEL. GroEL is part of the GroE chaperone system that consists of two stacked ring-shaped oligomeric components with a hydrophobic center within which proteins can fold. To mediate protein folding, a fully functional system consisting of GroEL, the cochaperone GroES, and ATP is thought to be necessary. Driven by ATP binding and hydrolysis, this system cycles through different conformational stages, which allow binding, folding, and release of the substrate proteins.

[0674] H. pylori infected individuals possess high titres of anti-hsp60 antisera, suggesting surface localization of hsp60 and a role in immunity. Whether the anti-hsp60 immune response is associated with protection or damage is currently unknown. However, monoclonal anti-hsp60 antibodies specific for the H. pylori hsp60 homologue have recently shown to confer a protective affect against H. pylori colonization. Earlier studies have demonstrated that the H. pylori homolog of the GroEL co-chaperone GroES, confers a protective immunity against mucosal infection in mice and makes an ideal candidate for an H. pylori subunit vaccine. GroEL homologs may play a similar role in other types of microorganisms.

[0675] With respect to SEQ ID NO: 356 and SEQ ID NO: 358 from S. aureus, the protein annotation is ATP-binding component of molybdate transport system, with gene designation of modF. ModF is an uncharacterized member of the ABC superfamily of transporters. The protein encoded by the gene is the putative ATP-binding component of a transport system that could be involved in the uptake of molybdenum.

[0676] With respect to SEQ ID NO: 365 and SEQ ID NO: 367 from P. aeruginosa, the protein annotation is DNA topoisomerase IV subunit A, with gene designation of parC. At least two different type II topoisomerases have been observed in bacteria. One, DNA gyrase, is believed to introduce negative supercoils into DNA, and the other, par (Topoisomerase IV), is believed to relax DNA supercoils. Topoisomerase IV is comprised of an ATP-binding subunit, parE, and the catalytic subunit parC. The genes encoding the topoisomerases appear to be highly conserved among all bacteria and are believed to be essential for cell viability. The class of antibiotics known as the fluoroquinolones are thought to target this class of enzymes.

[0677] With respect to SEQ ID NO: 374 and SEQ ID NO: 376 from S. pneumoniae, the protein annotation is GTP cyclohydrolase II, with gene designation of ribA. Currently, six bacterial genes, ribA-F, are believed to be involved in the synthesis of riboflavin and flavocoenzymes. Numerous microorganisms require endogenous synthesis of riboflavin for viability. The essential gene ribA encodes guanine triphosphate (GTP) cyclohydrolase II, which is involved in the first step of riboflavin synthesis. Guanine triphosphate (GTP) cyclohydrolase II has been observed to catalyze the release of formate from the imidazole ring of GTP and pyrophosphate. The C-8 of the GTP is thought to interact with the enzyme during catalysis such that 2,5-diamino-6-ribosylamino-4(3H)-pyrimidone 5′-phosphate is the major product of the reaction.

[0678] With respect to SEQ ID NO: 383 and SEQ ID NO: 385 from E. faecalis, the protein annotation is putative aspartate-semialdehyde dehydrogenase, with gene designation of usg. The usg gene product is PTS system enzyme IIA, which is believed to be one of the key enzyme of bacterial sugar transport system. The PTS is a sugar transport system. It is known to translocate carbohydrates (e.g. glucose, lactose, mannitol) across the membrane into the cell. During the transport, the sugar is phosphorylated. The phospho group is transferred from phosphoenolpyruvate (PEP) to the carbohydrate via the phospho intermediates of the protein components EnzymeI (“EI”), HPr and EnzymeII (“EII”). The purpose of the bacterial phosphotransferase system is the specific uptake of sugars into the cells, as the sugars are transported against a concentration gradient with concomitant phosphorylation. Because of the key role that the polypeptides of the invention play in this translocation process, they present attractive drug targets.

[0679] The phosphate donor for this translocation is the “energy rich” PEP. The phosphate is transferred via the soluble (and non sugar specific) enzymes EI and HPr to the enzyme complex EII. EII is made up of the components A, B and C, which according to sugar specificity and bacterium involved may be domains of composite proteins. Component/domain C is thought to be the permease and anchored to the cytoplasmic membrane. In the glucose PTS of E. coli, EIIA is a soluble protein, whereas EIIB/C is membrane bound. The phosphate group cleaved off the PEP is believed to be bound covalently to the proteins at histidine or cysteine residues. The amount of phosphorylation of the enzymes influences other regulatory mechanisms in the cells, such as catabolite repression or chemotaxis.

[0680] In the phosphorylation chain of the PTS, EIIA is thought to be the first sugar specific enzyme. Its degree of phosphorylation appears to be a sensor for the metabolic state of the cell. Besides transferring the phosphate group from HPr to the permease EIIB/C, it also appears to manage chemotaxis toward sugars being transported by the PTS. Additionally, it is thought to regulate the activity of the adenylate cyclase, of some permeases for non-PTS-sugars and the transcription of some operons.

[0681] With respect to SEQ ID NO: 401 and SEQ ID NO: 403 from S. aureus, the protein annotation is GroES protein, with gene designation of groES. Further, with respect to SEQ ID NO: 410 and SEQ ID NO: 412 from P. aeruginosa, the protein annotation is GroES protein, with gene designation of groES. Still further, with respect to SEQ ID NO: 419 and SEQ ID NO: 421 from H. pylori, the protein annotation is GroES protein, with gene designation of groES. Unfolded or partially folded peptides are involved in protein translation, membrane transport, and survival under heat shock conditions. Because folded or partially folded peptides tend to aggregate into biologically inactive formations, molecular chaperone systems such as the bacterial GroEL-GroES system are believed to bind hydrophobic sequences in unfolded or partially folded peptides and prevent their aggregation, allowing them to remain biologically active in addition to assisting in the correct re-folding of the peptides. In addition to preventing protein aggregation, GroEL-GroES assists in protein folding by enclosing substrate peptides in a cage created by the GroEL cylinder and GroES cap where folding can take place in a protected environment. In addition, GroEL-GroES also seems to be able to unfold kinetically trapped folding intermediates, allowing subsequent correct folding. The GroEL-GroES chaperone system is essential for cell viability.

[0682] With respect to SEQ ID NO: 428 and SEQ ID NO: 430 from E. coli, the protein annotation is transcription termination factor NusG, with gene designation of nusG. Further, with respect to SEQ ID NO: 446 and SEQ ID NO: 448 from H. pylori, the protein annotation is transcription termination factor NusG, with gene designation of nusG. Still further, with respect to SEQ ID NO: 455 and SEQ ID NO: 457 from S. pneumoniae, the protein annotation is transcription termination factor NusG, with gene designation of nusG. In E. coli, termination of RNA transcription is believed to occur through two separate mechanisms. Intrinsic termination, or non-Rho dependent termination, is thought to require only RNA polymerase and a DNA template. Factor-dependent termination, or Rho-dependent termination, has been observed to also require the Rho protein, and, depending on the transcript, other proteins as well. In addition to RNA polymerase and Rho protein, some Rho-dependent terminating transcripts require NusG, an bacterial protein that is known to be essential. In Rho-dependent termination, a Rho hexamer has been observed to bind to the nascent single stranded RNA. Rho moves along the RNA, in a 5′-3′ direction, with hydrolysis of ATP. Upon reaching the elongation complex, RNA dissociates from the complex. For some transcripts, it has been observed that monomeric NusG is needed to allow for Rho-dependent termination. For all of the foregoing reasons, the polypeptides of the present invention are potentially valuable targets for therapeutics and diagnostics. For example, a therapeutic targeted at a polypeptide of the invention could result in disruption of transcription termination, thereby reducing the viability of organism.

[0683] With respect to SEQ ID NO: 437 and SEQ ID NO: 439 from S. aureus, the protein annotation is GrpE protein, with gene designation of grpE. Involvement of unfolded or partially folded peptides in protein translation, membrane transport, and survival under heat shock conditions has been observed. Unfolded or partially folded peptides tend to aggregate into biologically inactive formations. Molecular chaperones, such as the Hsp70 proteins, have been observed to bind hydrophobic sequences in unfolded or partially folded peptides and prevent their aggregation, allowing them to remain biologically active and are also thought to assist in the correct re-folding of the peptides. In the bacterial equivalent of the Hsp70 chaperone cycle, a DnaK core is assisted by cochaperones DnaJ and GrpE in binding sequences of unfolded or partially folded peptides. DnaK may exist in at least two states: 1) the T-state, in which DnaK is ATP-liganded and has a low affinity for peptide substrates and 2) the R-state, in which DnaK is ADP-liganded and has a high affinity for peptide substrates. When in the R-state, DnaK may prevent peptide aggregation at heat shock temperatures. DnaJ has been observed to mediate the DnaK T- to R-state conversion, furthering hydrolysis of the DnaK-bound ATP and increasing affinity for the peptide substrate. GrpE is thought to facilitate the DnaK R- to T-state conversion, assisting in the exchange of DnaK-bound ADP for ATP and lowering affinity for the peptide substrate.

[0684] In Escherichia coli, the homodimeric GrpE is the only component of this bacterial HSP70-like chaperone cycle that appears to undergo a structural transition under heat shock conditions. At heat shock temperatures (around 48 degrees Celsius), GrpE has been observed to undergo a fully reversible structural transition that greatly reduces GrpE nucleotide exchange stimulation. Reduction of GrpE nucleotide exchange stimulation appears to leave DnaK locked in an R-state. Thus, GrpE may operate not only as a cochaperone of the DnaK chaperone cycle, but also potentially as a thermosensor and functional switch of the DnaK chaperone cycle between permissive and heat shock temperatures. In addition, GrpE is essential for bacterial viability.

[0685] With respect to SEQ ID NO: 464 and SEQ ID NO: 466 from H. pylori, the protein annotation is DNA-directed RNA polymerase, alpha subunit, with gene designation of rpoA. Further, with respect to SEQ ID NO: 473 and SEQ ID NO: 475 from S. aureus, the protein annotation is DNA-directed RNA polymerase, alpha subunit, with gene designation of rpoA. DNA-dependent RNA polymerase (RNAP) is thought to be an essential and universally conserved protein in bacterial synthesis of RNA during transcription. The enzyme comprises four subunits, with a molecular mass of around 400 kDa. One of the four subunits of this enzyme is encoded by the gene rpoA. Another subunit, namely, beta-prime, is the target of Rifampicin, a broad spectrum antibiotic.

[0686] With respect to SEQ ID NO: 482 and SEQ ID NO: 484 from H. pylori, the protein annotation is prolyl-tRNA synthetase, with gene designation of proS. With respect to SEQ ID NO: 491 and SEQ ID NO: 493 from S. pneumoniae, the protein annotation is seryl-tRNA synthetase, with gene designation of serS. Proteins (for example, enzymes, transporters, molecular messengers, structural elements, and macromolecular complexes) are encoded by a DNA or RNA template. The accuracy of the translation from the nucleotide template to the amino acid sequence is extremely important. Amino acids may be activated and transported to the ribosome via attachment to tRNA, an adaptor molecule. The activation and subsequent linkage to tRNA are thought to be catalyzed by aminoacyl-tNA synthetases. When a tRNA molecule recognizes its correct codon on a ribosome bound mRNA, the attached amino acid is released and added onto the growing polypeptide chain. While tRNA recognizes the correct codon on the mRNA, tRNA itself appears to be not responsible for ensuring that the correct amino acid is attached. Rather, aminoacyl-tRNA synthetases are thought to match the correct amino acid to the right tRNA, ensuring that a protein is accurately synthesized according to its nucleotide template.

[0687] In aminoacyl-tRNA synthetases, amino acid substrates have been observed to bind the acylation site, become activated, and become attach to tRNA. In addition to the acylation site, most aminoacyl-tRNA synthetases are thought to contain a hydrolytic site. The appropriate tRNA substrate appears to be recognized by the aminoacyl-tRNA synthetases in several ways, such as by the anticodon loop, acceptor stem, or another such unique identifying characteristic. Acylation sites appear to reject amino acid substrates that are larger than the correct amino acid via steric hindrance and geometry. Hydrolytic sites appear to destroy activated intermediates that are smaller than the correct activated intermediate. Aminoacyl-tRNA synthetases that do not have a hydrolytic site appear to be able to discriminate between correct and incorrect amino acids without it. It has been proposed that the extreme selectivity of aminoacyl-tRNA synthetases in recognition of both the amino acid substrate and the prospective tRNA acceptor establish the basis for the fidelity of protein synthesis.

[0688] In Escherichia coli, the aminoacyl-tRNA synthetase thought to attach proline to its appropriate tRNA is prolyl-tRNA synthetase. Prolyl-tRNA synthetase is a class II aminoacyl-tRNA synthetase.

[0689] In Escherichia coli, the aminoacyl-tRNA synthetase thought to attach serine to its appropriate tRNA is seryl tRNA synthetase (SRS). SRS is a dimeric, class II aminoacyl-tRNA synthetase.

[0690] With respect to SEQ ID NO: 500 and SEQ ID NO: 502 from P. aeruginosa, the protein annotation is L-cysteine desulfurase, with gene designation of iscS. Cysteine has been shown to be the source of sulfur for the biosynthesis of a variety of cofactors. IscS is a cysteine desulfurase, that acts on cysteine and selenocysteine, to produce elemental sulfur and selenium repectively, and alanine. IscS plays a major role in providing sulfur in the formation of Fe—S clusters, and is subsequently required for the biosynthesis of 4-thiouridine, thiamin and NAD. Attempts at deleting this gene from A. vinelandii were unsuccessful, suggesting this gene is essential in that organism. In addition, studies in yeast have suggested that the iscS homologue (Nfs1) may also be essential in this organism. Furthermore this gene is very well-conserved in both Gram positive and negative bacteria. The protein encoded by the Staphylococcus aureus orthologue of this gene has been observed to be an important gene for bacterial viability.

[0691] With respect to SEQ ID NO: 509 and SEQ ID NO: 511 from E. coli, the protein annotation is RhlR and LasR homologue, with gene designation of sdiA. With respect to SEQ ID NO: 518 and SEQ ID NO: 520 from P. aeruginosa, the protein annotation is autoinducer synthesis protein RhlI, with gene designation of rhlI. With respect to SEQ ID NO: 527 and SEQ ID NO: 529 from P. aeruginosa, the protein annotation is autoinducer synthesis protein LasI, with gene designation of lasI. Pseudomonas aeruginosa is a human pathogen which may lead to persistent infections, for example, by permanently colonizing the lung of cystic fibrosis patients. Such infections frequently are resistant to antibiotic treatments. Cell to cell communication (quorum sensing) in Pseudomonas aeruginosa is regulated by LasI/LasR and RhlI/RhlR systems. These systems, in turn, are known to regulate virulence, production of secondary metabolites, symbiosis and biofilm formation. LasI and RhlI are autoinducer synthases which catalyze the production of signal molecules called autoinducer. Autoinducers are believed to be N-(3-oxododecanoyl) homoserine lactone and N-butyryl homoserine lactone that are produced by LasI and RhlI, respectively. Autoinducers bind to the regulatory proteins (LasR and RhlR) which regulate the expression of specific genes. Inhibiting LasI and RhlI is crucial to the treatment of drug resistant bacterial infections by Pseudomonas aeruginosa. SdiA is an E. coli homologue of LasR and RhlR which controls the expression of the ftsQAZ operon for cell division.

[0692] With respect to SEQ ID NO: 536 and SEQ ID NO: 538 from S. aureus, the protein annotation is adenylate kinase, with gene designation of adk. Adenylate kinase is a relatively small enzyme whose main function is to maintain the balance of adenine nucleotides in the cell. A form of such enzyme is believed to present in all bacteria. The major difference between the Gram positive and negative forms of the enzyme is that the former class of proteins have been found to contain a Zinc binding motif. The crystal structure of adenylate kinase from B. stearothermophilus suggests that bound zinc ions serves structural rather then catalytic function. This enzyme has been found to be essential for cell viability in both Gram positive and negative bacteria.

[0693] With respect to SEQ ID NO: 545 and SEQ ID NO: 547 from H. pylori, the protein annotation is UDP—N-acetylglucosamine pyrophosphorylase (glmU), with gene designation of glmU. In bacteria, UDP—N-acetylglucosamine (UDP-GlcNAc) is thought to be a precursor for formation of essential cell-envelope constituents such as peptidoglycan, lipopolysaccharide, teichoic acid, as well as the formation of the enterobacterial common antigen. The GlmU gene product has been observed to catalyze the final two reactions in the prokaryotic de novo biosynthetic pathway for UDP-GlcNAc. The homotrimeric, bifunctional enzyme appears to catalyze both the acetylation of glucosamine-1-phosphate to form N-acetylglucosamine-1-phosphate, and the uridylation of N-acetylglucosamine-1-phosphate to form UDP-GlcNAc. Both the acetyltransferase and uridyltransferase activities are essential for cell viability. Because trimerization is apparently required for acetyltransferase activity, trimerization is also thought to be essential for cell viability.

[0694] The eukaryotic UDP-GlcNAc biosynthesis pathway differs significantly from the bacterial pathway in two respects. First, acetyl transfer has been observed to occur on N-acetylglucosamine-6-phosphate rather than N-acetylglucosamine-1-phosphate. Second, the acetyltransferase and uridyltransferase activities are apparently carried out by two distinct monofunctional enzymes, which have little sequence homology to the bacterial GlmU gene product.

[0695] With respect to SEQ ID NO: 554 and SEQ ID NO: 556 from E. coli, the protein annotation is geranyltranstransferase (farnesyldiphosphate synthase), with gene designation of ispA. Prenyltransferases constitute a large enzyme family which have been observed to catalyze the sequential condensation of isopentenyl diphosphate (IPP) with allylic diphosphates to form prenyl diphosphates. Isoprenoid diphosphates appear to be formed by the 1′-4 addition of IPP molecules to a growing chain. The 1′-4 condensation reactions may be catalyzed by a family of prenyltransferases, the isoprenyl diphosphate synthases, that are highly selective for the chain lengths and double bond stereochemistries of both the substrates and products.

[0696] The isoprenoid biosynthetic pathway begins with the C5 molecule dimethylallyl diphosphate (DMAPP). Subsequent diphosphates include: geranyl diphosphate, C10 (GPP), farnesyl diphosphate, C15 (FPP), geranylgeranyl diphosphate, C20 (GGPP) and even higher molecular weight diphosphates. The most widely distributed prenyltransferase, the homodimeric farnesyl diphosphate (FPP) synthase, appears to catalyze two consecutive reactions; (1) the condensation of two IPP molecules with dimethylallyl diphosphate (DMAPP) to form geranyl diphosphate (GPP), and (2) the condensation of IPP with the GPP resulting from the first reaction to produce FPP. FPP is a key precursor for most physiologically important isoprenoid compounds, such as steroids, cholesterol, farnesylated proteins, prenylated quinones, dolichols, and hemes.

[0697] With respect to SEQ ID NO: 563 and SEQ ID NO: 565 from H. pylori, the protein annotation is enoyl-(acyl-carrier-protein) reductase (NADH), with gene designation of fabI. Fatty acid biosynthesis may be carried out by the ubiquitous fatty-acid synthase (FAS) system. The pathway for the biosynthesis of saturated fatty acids is very similar in prokaryotes and eukaryotes. However, in yeast and vertebrates the type I FAS system may be employed, whereby fatty acid biosynthesis is carried out by a single multifunctional polypeptide complex. In contrast, most bacteria and plants employ the type II FAS system, in which each of the reactions may be catalyzed by distinct monofunctional enzymes and ACP is a discrete protein. Thus, there appears to be considerable potential for selective inhibition of the bacterial systems by broad spectrum antibacterial agents. The first step in the biosynthetic cycle is the condensation of malonyl-ACP (3C) with acetyl-CoA (2C) by FabH. Prior to this, malonyl-ACP is synthesized from ACP and malonyl-CoA by FabD, malonyl CoA:ACP transacylase. In subsequent rounds malonyl-ACP is condensed with the growing-chain acyl-ACP (4C). The second step in the elongation cycle is ketoester reduction by NADPH-dependent beta.-ketoacyl-ACP reductase (FabG). Subsequent dehydration by beta.-hydroxyacyl-ACP dehydrase (either FabA or FabZ) leads to trans-2-enoyl-ACP which is in turn converted to acyl-ACP by enoyl-ACP reductase (FabI). Further rounds of this cycle, adding two carbon atoms per cycle, eventually lead to palmitoyl-ACP whereupon the cycle is stopped largely due to feedback inhibition of FabH and I by palmitoyl-ACP. The absolute requirement of type II FAS for bacterial viability, together with its major differences with the mammalian system, suggests that enzymes in this pathway may be good targets with selective compunds as broad-spectrum antibacterial drugs. Fab I is one of the enzymes in this pathway.

[0698] With respect to SEQ ID NO: 572 and SEQ ID NO: 574 from H. pylori, the protein annotation is ribonucleoside diphosphate reductase, beta subunit, with gene designation of nrdB. Ribonucleoside diphosphate reductase (ribonucleotide reductase) is believed to catalyze the 2′-reduction of ribonucleoside diphosphates to deoxyribonucleoside diphosphates needed for DNA synthesis and repair. Structurally, two folded polypeptides, R1 and R2, combine in an unknown stoichiometric ratio in the presence of magnesium to form ribonucleoside reductase in Escherichia coli. Ribonucleoside reductases are divided into three or more classes, all of which may require a protein radical for catalysis. The Escherichia coli ribonucleoside reductase R2 subunit is a prototypical class 1 ribonucleoside reductase, containing a binuclear iron center and a tyrosine residue that serves as a protein radical. The adenosyl-cobalamin-dependent ribonucleotide reductase is a prototypical class 2 ribonucleoside reductase, using homolysis of the carbon-cobalt bond to form cob(II)alamin and a 5′-deoxyadenosyl radical, which then forms a protein radical. Finally, the ribonucleotide reductase from anaerobically grown Escherichia coli has a Fe4-S4 cluster and uses adenosylmethionine to generate a protein radical on a glycine residue. It is hypothesized that all ribonucleotide reductases share a common mechanism involving free radicals and hydrogen abstractions to effect ribonucleotide reduction.

[0699] For all of the foregoing reasons, the polypeptides of the present invention are potentially valuable targets of therapeutics and diagnostics.

### 3. Nucleic Acids of the Invention

[0700] One aspect of the invention pertains to isolated nucleic acids of the invention. For example, the present invention contemplates an isolated nucleic acid comprising (a) a subject nucleic acid sequence, (b) a nucleotide sequence at least 80% identical to the subject nucleic acid sequence, (c) a nucleotide sequence that hybridizes under stringent conditions to the subject nucleic acid sequence, or (d) the complement of the nucleotide sequence of (a), (b) or (c). In certain embodiments, nucleic acids of the invention may be labeled, with for example, a radioactive, chemiluminescent or fluorescent label.

[0701] It may be the case that the nucleic acid sequence for a nucleic acid of the invention predicted from the publicly available genomic information differs from the nucleic acid sequence determined experimentally as described below. For example, in the case of lysyl-tRNA synthetase (lysS) from S. aureus, SEQ ID NO: 6 is determined experimentally, and SEQ ID NO: 4 obtained as described in EXAMPLE 1. In such a case, the present invention contemplates the specific nucleic acid sequences of SEQ ID NO: 4 and SEQ ID NO: 6, and variants thereof, as well as any differences in the applicable amino acid sequences encoded thereby.

[0702] In another aspect, the present invention contemplates an isolated nucleic acid that specifically hybridizes under stringent conditions to at least ten nucleotides of a subject nucleic acid sequence, or the complement thereof, which nucleic acid can specifically detect or amplify the same subject nucleic acid sequence, or the complement thereof. In yet another aspect, the present invention contemplates such an isolated nucleic acid comprising a nucleotide sequence encoding a fragment of a subject amino acid sequence at least 8 residues in length. The present invention further contemplates a method of hybridizing an oligonucleotide with a nucleic acid of the invention comprising: (a) providing a single-stranded oligonucleotide at least eight nucleotides in length, the oligonucleotide being complementary to a portion of a nucleic acid of the invention; and (b) contacting the oligonucleotide with a sample comprising a nucleic acid of the acid under conditions that permit hybridization of the oligonucleotide with the nucleic acid of the invention.

[0703] Isolated nucleic acids which differ from the nucleic acids of the invention due to degeneracy in the genetic code are also within the scope of the invention. For example, a number of amino acids are designated by more than one triplet. Codons that specify the same amino acid, or synonyms (for example, CAU and CAC are synonyms for histidine) may result in “silent” mutations which do not affect the amino acid sequence of the protein. However, it is expected that DNA sequence polymorphisms that do lead to changes in the amino acid sequences of the polypeptides of the invention will exist. One skilled in the art will appreciate that these variations in one or more nucleotides (from less than 1% up to about 3 or 5% or possibly more of the nucleotides) of the nucleic acids encoding a particular protein of the invention may exist among a given species due to natural allelic variation. Any and all such nucleotide variations and resulting amino acid polymorphisms are within the scope of this invention.

[0704] Bias in codon choice within genes in a single species appears related to the level of expression of the protein encoded by that gene. Accordingly, the invention encompasses nucleic acid sequences which have been optimized for improved expression in a host cell by altering the frequency of codon usage in the nucleic acid sequence to approach the frequency of preferred codon usage of the host cell. Due to codon degeneracy, it is possible to optimize the nucleotide sequence without affecting the amino acid sequence of an encoded polypeptide. Accordingly, the instant invention relates to any nucleotide sequence that encodes all or a substantial portion of a subject amino acid sequence or other polypeptides of the invention.

[0705] The present invention pertains to nucleic acids encoding proteins derived from the same pathogenic species as a polypeptide of the invention and which have amino acid sequences evolutionarily related to such polypeptide, wherein “evolutionarily related to”, refers to proteins having different amino acid sequences which have arisen naturally (e.g. by allelic variance or by differential splicing), as well as mutational variants of the proteins of the invention which are derived, for example, by combinatorial mutagenesis.

[0706] Fragments of the polynucleotides of the invention encoding a biologically active portion of a subject amino acid sequence or other polypeptides of the invention are also within the scope of the invention. As used herein, a fragment of a nucleic acid of the invention encoding an active portion of a polypeptide of the invention refers to a nucleotide sequence having fewer nucleotides than the nucleotide sequence encoding the full length amino acid sequence of a polypeptide of the invention, and which encodes a polypeptide which retains at least a portion of a biological activity of the full-length protein as defined herein, or alternatively, which is functional as a modulator of a biological activity of the full-length protein. For example, such fragments include a polypeptide containing a domain of the full-length protein from which the polypeptide is derived that mediates the interaction of the protein with another molecule (e.g., polypeptide, DNA, RNA, etc.). In another embodiment, the present invention contemplates an isolated nucleic acid that encodes a polypeptide having a biological activity of a subject amino acid sequence.

[0707] Nucleic acids within the scope of the invention may also contain linker sequences, modified restriction endonuclease sites and other sequences useful for molecular cloning, expression or purification of such recombinant polypeptides.

[0708] A nucleic acid encoding a polypeptide of the invention may be obtained from mRNA or genomic DNA from any organism in accordance with protocols described herein, as well as those generally known to those skilled in the art. A cDNA encoding a polypeptide of the invention, for example, may be obtained by isolating total mRNA from an organism, e.g. a bacteria, virus, mammal, etc. Double stranded cDNAs may then be prepared from the total mRNA, and subsequently inserted into a suitable plasmid or bacteriophage vector using any one of a number of known techniques. A gene encoding a polypeptide of the invention may also be cloned using established polymerase chain reaction techniques in accordance with the nucleotide sequence information provided by the invention. In one aspect, the present invention contemplates a method for amplification of a nucleic acid of the invention, or a fragment thereof, comprising: (a) providing a pair of single stranded oligonucleotides, each of which is at least eight nucleotides in length, complementary to sequences of a nucleic acid of the invention, and wherein the sequences to which the oligonucleotides are complementary are at least ten nucleotides apart; and (b) contacting the oligonucleotides with a sample comprising a nucleic acid comprising the nucleic acid of the invention under conditions which permit amplification of the region located between the pair of oligonucleotides, thereby amplifying the nucleic acid.

[0709] Another aspect of the invention relates to the use of nucleic acids of the invention in “antisense therapy”. As used herein, antisense therapy refers to administration or in situ generation of oligonucleotide probes or their derivatives which specifically hybridize or otherwise bind under cellular conditions with the cellular mRNA and/or genomic DNA encoding one of the polypeptides of the invention so as to inhibit expression of that polypeptide, e.g. by inhibiting transcription and/or translation. The binding may be by conventional base pair complementarity, or, for example, in the case of binding to DNA duplexes, through specific interactions in the major groove of the double helix. In general, antisense therapy refers to the range of techniques generally employed in the art, and includes any therapy which relies on specific binding to oligonucleotide sequences.

[0710] An antisense construct of the present invention may be delivered, for example, as an expression plasmid which, when transcribed in the cell, produces RNA which is complementary to at least a unique portion of the mRNA which encodes a polypeptide of the invention. Alternatively, the antisense construct may be an oligonucleotide probe which is generated ex vivo and which, when introduced into the cell causes inhibition of expression by hybridizing with the mRNA and/or genomic sequences encoding a polypeptide of the invention. Such oligonucleotide probes may be modified oligonucleotides which are resistant to endogenous nucleases, e.g. exonucleases and/or endonucleases, and are therefore stable in vivo. Exemplary nucleic acid molecules for use as antisense oligonucleotides are phosphoramidate, phosphothioate and methylphosphonate analogs of DNA (see also U.S. Pat. Nos. 5,176,996; 5,264,564; and 5,256,775). Additionally, general approaches to constructing oligomers useful in antisense therapy have been reviewed, for example, by van der Krol et al., (1988) Biotechniques 6:958-976; and Stein et al., (1988) Cancer Res48:2659-2668.

[0711] In a further aspect, the invention provides double stranded small interfering RNAs (siRNAs), and methods for administering the same. siRNAs decrease or block gene expression. While not wishing to be bound by theory, it is generally thought that siRNAs inhibit gene expression by mediating sequence specific mRNA degradation. RNA interference (RNAi) is the process of sequence-specific, post-transcriptional gene silencing, particularly in animals and plants, initiated by double-stranded RNA (dsRNA) that is homologous in sequence to the silenced gene (Elbashir et al. Nature 2001; 411(6836): 494-8). Accordingly, it is understood that siRNAs and long dsRNAs having substantial sequence identity to all or a portion of a subject nucleic acid sequence may be used to inhibit the expression of a nucleic acid of the invention, and particularly when the polynucleotide is expressed in a mammalian or plant cell.

[0712] The nucleic acids of the invention may be used as diagnostic reagents to detect the presence or absence of the target DNA or RNA sequences to which they specifically bind, such as for determining the level of expression of a nucleic acid of the invention. In one aspect, the present invention contemplates a method for detecting the presence of a nucleic acid of the invention or a portion thereof in a sample, the method comprising: (a) providing an oligonucleotide at least eight nucleotides in length, the oligonucleotide being complementary to a portion of a nucleic acid of the invention; (b) contacting the oligonucleotide with a sample comprising at least one nucleic acid under conditions that permit hybridization of the oligonucleotide with a nucleic acid comprising a nucleotide sequence complementary thereto; and (c) detecting hybridization of the oligonucleotide to a nucleic acid in the sample, thereby detecting the presence of a nucleic acid of the invention or a portion thereof in the sample. In another aspect, the present invention contemplates a method for detecting the presence of a nucleic acid of the invention or a portion thereof in a sample, the method comprising: (a) providing a pair of single stranded oligonucleotides, each of which is at least eight nucleotides in length, complementary to sequences of a nucleic acid of the invention, and wherein the sequences to which the oligonucleotides are complementary are at least ten nucleotides apart; and (b) contacting the oligonucleotides with a sample comprising at least one nucleic acid under hybridization conditions; (c) amplifying the nucleotide sequence between the two oligonucleotide primers; and (d) detecting the presence of the amplified sequence, thereby detecting the presence of a nucleic acid comprising the nucleic acid of the invention or a portion thereof in the sample.

[0713] In another aspect of the invention, the subject nucleic acid is provided in an expression vector comprising a nucleotide sequence encoding a polypeptide of the invention and operably linked to at least one regulatory sequence. It should be understood that the design of the expression vector may depend on such factors as the choice of the host cell to be transformed and/or the type of protein desired to be expressed. The vector's copy number, the ability to control that copy number and the expression of any other protein encoded by the vector, such as antibiotic markers, should be considered.

[0714] The subject nucleic acids may be used to cause expression and over-expression of a polypeptide of the invention in cells propagated in culture, e.g. to produce proteins or polypeptides, including fusion proteins or polypeptides.

[0715] This invention pertains to a host cell transfected with a recombinant gene in order to express a polypeptide of the invention. The host cell may be any prokaryotic or eukaryotic cell. For example, a polypeptide of the invention may be expressed in bacterial cells, such as E. coli, insect cells (baculovirus), yeast, or mammalian cells. In those instances when the host cell is human, it may or may not be in a live subject. Other suitable host cells are known to those skilled in the art. Additionally, the host cell may be supplemented with tRNA molecules not typically found in the host so as to optimize expression of the polypeptide. Other methods suitable for maximizing expression of the polypeptide will be known to those in the art.

[0716] The present invention further pertains to methods of producing the polypeptides of the invention. For example, a host cell transfected with an expression vector encoding a polypeptide of the invention may be cultured under appropriate conditions to allow expression of the polypeptide to occur. The polypeptide may be secreted and isolated from a mixture of cells and medium containing the polypeptide. Alternatively, the polypeptide may be retained cytoplasmically and the cells harvested, lysed and the protein isolated.

[0717] A cell culture includes host cells, media and other byproducts. Suitable media for cell culture are well known in the art. The polypeptide may be isolated from cell culture medium, host cells, or both using techniques known in the art for purifying proteins, including ion-exchange chromatography, gel filtration chromatography, ultrafiltration, electrophoresis, and immunoaffinity purification with antibodies specific for particular epitopes of a polypeptide of the invention.

[0718] Thus, a nucleotide sequence encoding all or a selected portion of polypeptide of the invention, may be used to produce a recombinant form of the protein via microbial or eukaryotic cellular processes. Ligating the sequence into a polynucleotide construct, such as an expression vector, and transforming or transfecting into hosts, either eukaryotic (yeast, avian, insect or mammalian) or prokaryotic (bacterial cells), are standard procedures. Similar procedures, or modifications thereof, may be employed to prepare recombinant polypeptides of the invention by microbial means or tissue-culture technology.

[0719] Expression vehicles for production of a recombinant protein include plasmids and other vectors. For instance, suitable vectors for the expression of a polypeptide of the invention include plasmids of the types: pBR322-derived plasmids, pEMBL-derived plasmids, pEX-derived plasmids, pBTac-derived plasmids and pUC-derived plasmids for expression in prokaryotic cells, such as E. coli.

[0720] A number of vectors exist for the expression of recombinant proteins in yeast. For instance, YEP24, YIP5, YEP51, YEP52, pYES2, and YRP17 are cloning and expression vehicles useful in the introduction of genetic constructs into S. cerevisiae (see, for example, Broach et al., (1983) in Experimental Manipulation of Gene Expression, ed. M. Inouye Academic Press, p. 83). These vectors may replicate in E. coli due the presence of the pBR322 ori, and in S. cerevisiae due to the replication determinant of the yeast 2 micron plasmid. In addition, drug resistance markers such as ampicillin may be used.

[0721] In certain embodiments, mammalian expression vectors contain both prokaryotic sequences to facilitate the propagation of the vector in bacteria, and one or more eukaryotic transcription units that are expressed in eukaryotic cells. The pcDNAI/amp, pcDNAI/neo, pRc/CMV, pSV2gpt, pSV2neo, pSV2-dhfr, pTk2, pRSVneo, pMSG, pSVT7, pko-neo and pHyg derived vectors are examples of mammalian expression vectors suitable for transfection of eukaryotic cells. Some of these vectors are modified with sequences from bacterial plasmids, such as pBR322, to facilitate replication and drug resistance selection in both prokaryotic and eukaryotic cells. Alternatively, derivatives of viruses such as the bovine papilloma virus (BPV-1), or Epstein-Barr virus (pHEBo, pREP-derived and p205) can be used for transient expression of proteins in eukaryotic cells. The various methods employed in the preparation of the plasmids and transformation of host organisms are well known in the art. For other suitable expression systems for both prokaryotic and eukaryotic cells, as well as general recombinant procedures, see Molecular Cloning A Laboratory Manual, 2nd Ed., ed. by Sambrook, Fritsch and Maniatis (Cold Spring Harbor Laboratory Press, 1989) Chapters 16 and 17. In some instances, it may be desirable to express the recombinant protein by the use of a baculovirus expression system. Examples of such baculovirus expression systems include pVL-derived vectors (such as pVL1392, pVL1393 and pVL941), pAcUW-derived vectors (such as pAcUW1), and pBlueBac-derived vectors (such as the β-gal containing pBlueBac III).

[0722] In another variation, protein production may be achieved using in vitro translation systems. In vitro translation systems are, generally, a translation system which is a cell-free extract containing at least the minimum elements necessary for translation of an RNA molecule into a protein. An in vitro translation system typically comprises at least ribosomes, tRNAs, initiator methionyl-tRNAMet, proteins or complexes involved in translation, e.g., eIF2, eIF3, the cap-binding (CB) complex, comprising the cap-binding protein (CBP) and eukaryotic initiation factor 4F (eIF4F). A variety of in vitro translation systems are well known in the art and include commercially available kits. Examples of in vitro translation systems include eukaryotic lysates, such as rabbit reticulocyte lysates, rabbit oocyte lysates, human cell lysates, insect cell lysates and wheat germ extracts. Lysates are commercially available from manufacturers such as Promega Corp., Madison, Wisc.; Stratagene, La Jolla, Calif.; Amersham, Arlington Heights, Ill.; and GIBCO/BRL, Grand Island, N.Y. In vitro translation systems typically comprise macromolecules, such as enzymes, translation, initiation and elongation factors, chemical reagents, and ribosomes. In addition, an in vitro transcription system may be used. Such systems typically comprise at least an RNA polymerase holoenzyme, ribonucleotides and any necessary transcription initiation, elongation and termination factors. In vitro transcription and translation may be coupled in a one-pot reaction to produce proteins from one or more isolated DNAs.

[0723] When expression of a carboxy terminal fragment of a polypeptide is desired, i.e. a truncation mutant, it may be necessary to add a start codon (ATG) to the oligonucleotide fragment containing the desired sequence to be expressed. It is well known in the art that a methionine at the N-terminal position may be enzymatically cleaved by the use of the enzyme methionine aminopeptidase (MAP). MAP has been cloned from E. coli (Ben-Bassat et al., (1987) J. Bacteriol. 169:751-757) and Salmonella typhimurium and its in vitro activity has been demonstrated on recombinant proteins (Miller et al., (1987) PNAS USA 84:2718-1722). Therefore, removal of an N-terminal methionine, if desired, may be achieved either in vivo by expressing such recombinant polypeptides in a host which produces MAP (e.g., E. coli or CM89 or S. cerevisiae), or in vitro by use of purified MAP (e.g., procedure of Miller et al.).

[0724] Coding sequences for a polypeptide of interest may be incorporated as a part of a fusion gene including a nucleotide sequence encoding a different polypeptide. The present invention contemplates an isolated nucleic acid comprising a nucleic acid of the invention and at least one heterologous sequence encoding a heterologous peptide linked in frame to the nucleotide sequence of the nucleic acid of the invention so as to encode a fusion protein comprising the heterologous polypeptide. The heterologous polypeptide may be fused to (a) the C-terminus of the polypeptide encoded by the nucleic acid of the invention, (b) the N-terminus of the polypeptide, or (c) the C-terminus and the N-terminus of the polypeptide. In certain instances, the heterologous sequence encodes a polypeptide permitting the detection, isolation, solubilization and/or stabilization of the polypeptide to which it is fused. In still other embodiments, the heterologous sequence encodes a polypeptide selected from the group consisting of a polyHis tag, myc, HA, GST, protein A, protein G, calmodulin-binding peptide, thioredoxin, maltose-binding protein, poly arginine, poly His-Asp, FLAG, a portion of an immunoglobulin protein, and a transcytosis peptide.

[0725] Fusion expression systems can be useful when it is desirable to produce an immunogenic fragment of a polypeptide of the invention. For example, the VP6 capsid protein of rotavirus may be used as an immunologic carrier protein for portions of polypeptide, either in the monomeric form or in the form of a viral particle. The nucleic acid sequences corresponding to the portion of a polypeptide of the invention to which antibodies are to be raised may be incorporated into a fusion gene construct which includes coding sequences for a late vaccinia virus structural protein to produce a set of recombinant viruses expressing fusion proteins comprising a portion of the protein as part of the virion. The Hepatitis B surface antigen may also be utilized in this role as well. Similarly, chimeric constructs coding for fusion proteins containing a portion of a polypeptide of the invention and the poliovirus capsid protein may be created to enhance immunogenicity (see, for example, EP Publication NO: 0259149; and Evans et al., (1989) Nature 339:385; Huang et al., (1988) J. Virol. 62:3855; and Schlienger et al., (1992) J. Virol. 66:2).

[0726] Fusion proteins may facilitate the expression and/or purification of proteins. For example, a polypeptide of the invention may be generated as a glutathione-S-transferase (GST) fusion protein. Such GST fusion proteins may be used to simplify purification of a polypeptide of the invention, such as through the use of glutathione-derivatized matrices (see, for example, Current Protocols in Molecular Biology, eds. Ausubel et al., (N.Y.: John Wiley & Sons, 1991)). In another embodiment, a fusion gene coding for a purification leader sequence, such as a poly-(His)/enterokinase cleavage site sequence at the N-terminus of the desired portion of the recombinant protein, may allow purification of the expressed fusion protein by affinity chromatography using a Ni²⁺ metal resin. The purification leader sequence may then be subsequently removed by treatment with enterokinase to provide the purified protein (e.g., see Hochuli et al., (1987) J. Chromatography 411: 177; and Janknecht et al., PNAS USA 88:8972).

[0727] Techniques for making fusion genes are well known. Essentially, the joining of various DNA fragments coding for different polypeptide sequences is performed in accordance with conventional techniques, employing blunt-ended or stagger-ended termini for ligation, restriction enzyme digestion to provide for appropriate termini, filling-in of cohesive ends as appropriate, alkaline phosphatase treatment to avoid undesirable joining, and enzymatic ligation. In another embodiment, the fusion gene may be synthesized by conventional techniques including automated DNA synthesizers. Alternatively, PCR amplification of gene fragments may be carried out using anchor primers which give rise to complementary overhangs between two consecutive gene fragments which may subsequently be annealed to generate a chimeric gene sequence (see, for example, Current Protocols in Molecular Biology, eds. Ausubel et al., John Wiley & Sons: 1992).

[0728] The present invention further contemplates a transgenic non-human animal having cells which harbor a transgene comprising a nucleic acid of the invention.

[0729] In other embodiments, the invention provides for nucleic acids of the invention immobilized onto a solid surface, including, plates, microtiter plates, slides, beads, particles, spheres, films, strands, precipitates, gels, sheets, tubing, containers, capillaries, pads, slices, etc. The nucleic acids of the invention may be immobilized onto a chip as part of an array. The array may comprise one or more polynucleotides of the invention as described herein. In one embodiment, the chip comprises one or more polynucleotides of the invention as part of an array of polynucleotide sequences from the same pathogenic species as such polynucleotide(s).

[0730] In still other embodiments, the invention comprises the sequence of a nucleic acid of the invention in computer readable format. The invention also encompasses a database comprising the sequence of a nucleic acid of the invention.

### 4. Homology Searching of Nucleotide and Polypeptide Sequences

[0731] The nucleotide or amino acid sequences of the invention, including those set forth in the appended Figures, may be used as query sequences against databases such as GenBank, SwissProt, PDB, BLOCKS, and Pima II. These databases contain previously identified and annotated sequences that may be searched for regions of homology (similarity) using BLAST, which stands for Basic Local Alignment Search Tool (Altschul S F (1993) J Mol Evol 36:290-300; Altschul, S F et al (1990) J Mol Biol 215:403-10).

[0732] BLAST produces alignments of both nucleotide and amino acid sequences to determine sequence similarity. Because of the local nature of the alignments, BLAST is especially useful in determining exact matches or in identifying homologs which may be of prokaryotic (bacterial) or eukaryotic (animal, fungal or plant) origin. Other algorithms such as the one described in Smith, R. F. and T. F. Smith (1992; Protein Engineering 5:35-51) may be used when dealing with primary sequence patterns and secondary structure gap penalties. In the usual course using BLAST, sequences have lengths of at least 49 nucleotides and no more than 12% uncalled bases (where N is recorded rather than A, C, G, or T).

[0733] The BLAST approach, as detailed in Karlin and Altschul (1993; Proc Nat Acad Sci 90:5873-7) searches matches between a query sequence and a database sequence, to evaluate the statistical significance of any matches found, and to report only those matches which satisfy the user-selected threshold of significance. The threshold is typically set at about 10-25 for nucleotides and about 3-15 for peptides.

### 5. Analysis of Protein Properties

[0734] (a) Analysis of Proteins by Mass Spectrometry

[0735] Typically, protein characterization by mass spectroscopy first requires protein isolation followed by either chemical or enzymatic digestion of the protein into smaller peptide fragments, whereupon the peptide fragments may be analyzed by mass spectrometry to obtain a peptide map. Mass spectrometry may also be used to identify post-translational modifications (e.g., phosphorylation, etc.) of a polypeptide.

[0736] Various mass spectrometers may be used within the present invention. Representative examples include: triple quadrupole mass spectrometers, magnetic sector instruments (magnetic tandem mass spectrometer, JEOL, Peabody, Mass.), ionspray mass spectrometers (Bruins et al., Anal Chem. 59:2642-2647, 1987), electrospray mass spectrometers (including tandem, nano- and nano-electrospray tandem) (Fenn et al., Science 246:64-71, 1989), laser desorption time-of-flight mass spectrometers (Karas and Hillenkamp, Anal. Chem. 60:2299-2301, 1988), and a Fourier Transform Ion Cyclotron Resonance Mass Spectrometer (Extrel Corp., Pittsburgh, Mass.).

[0737] MALDI ionization is a technique in which samples of interest, in this case peptides and proteins, are co-crystallized with an acidified matrix. The matrix is typically a small molecule that absorbs at a specific wavelength, generally in the ultraviolet (UV) range, and dissipates the absorbed energy thermally. Typically a pulsed laser beam is used to transfer energy rapidly (i.e., a few ns) to the matrix. This transfer of energy causes the matrix to rapidly dissociate from the MALDI plate surface and results in a plume of matrix and the co-crystallized analytes being transferred into the gas phase. MALDI is considered a “soft-ionization” method that typically results in singly-charged species in the gas phase, most often resulting from a protonation reaction with the matrix. MALDI may be coupled in-line with time of flight (TOF) mass spectrometers. TOF detectors are based on the principle that an analyte moves with a velocity proportional to its mass. Analytes of higher mass move slower than analytes of lower mass and thus reach the detector later than lighter analytes. The present invention contemplates a composition comprising a polypeptide of the invention and a matrix suitable for mass spectrometry. In certain instances, the matrix is a nicotinic acid derivative or a cinnamic acid derivative.

[0738] MALDI-TOF MS is easily performed with modern mass spectrometers. Typically the samples of interest, in this case peptides or proteins, are mixed with a matrix and spotted onto a polished stainless steel plate (MALDI plate). Commercially available MALDI plates can presently hold up to 1536 samples per plate. Once spotted with sample, the MALDI sample plate is then introduced into the vacuum chamber of a MALDI mass spectrometer. The pulsed laser is then activated and the mass to charge ratios of the analytes are measured utilizing a time of flight detector. A mass spectrum representing the mass to charge ratios of the peptides/proteins is generated.

[0739] As mentioned above, MALDI can be utilized to measure the mass to charge ratios of both proteins and peptides. In the case of proteins, a mixture of intact protein and matrix are co-crystallized on a MALDI target (Karas, M. and Hillenkamp, F. Anal. Chem. 1988, 60 (20) 2299-2301). The spectrum resulting from this analysis is employed to determine the molecular weight of a whole protein. This molecular weight can then be compared to the theoretical weight of the protein and utilized in characterizing the analyte of interest, such as whether or not the protein has undergone post-translational modifications (e.g., example phosphorylation).

[0740] In certain embodiments, MALDI mass spectrometry is used for determination of peptide maps of digested proteins. The peptide masses are measured accurately using a MALDI-TOF or a MALDI-Q-Star mass spectrometer, with detection precision down to the low ppm (parts per million) level. The ensemble of the peptide masses observed in a protein-digest, such as a tryptic digest, may be used to search protein/DNA databases in a method called peptide mass fingerprinting. In this approach, protein entries in a database are ranked according to the number of experimental peptide masses that match the predicted trypsin digestion pattern. Commercially available software utilizes a search algorithm that provides a scoring scheme based on the size of the databases, the number of matching peptides, and the different peptides. Depending on the number of peptides observed, the accuracy of the measurement, and the size of the genome of the particular species, unambiguous protein identification may be obtained.

[0741] Statistical analysis may be performed upon each protein match to determine the validity of the match. Typical constraints include error tolerances within 0.1 Da for monoisotopic peptide masses, cysteines may be alkylated and searched as carboxyamidomethyl modifications, 0 or 1 missed enzyme cleavages, and no methionine oxidations allowed. Identified proteins may be stored automatically in a relational database with software links to SDS-PAGE images and ligand sequences. Often even a partial peptide map is specific enough for identification of the protein. If no protein match is found, a more error-tolerant search can be used, for example using fewer peptides or allowing a larger margin error with respect to mass accuracy.

[0742] Other mass spectroscopy methods such as tandem mass spectrometry or post source decay may be used to obtain sequence information about proteins that cannot be identified by peptide mass mapping, or to confirm the identity of proteins that are tentatively identified by an error-tolerant peptide mass search described above. (Griffin et al, Rapid Commun. Mass. Spectrom. 1995, 9,1546-51).

[0743] (b) Analysis of Proteins by Nuclear Magnetic Resonance (NMR)

[0744] NMR may be used to characterize the structure of a polypeptide in accordance with the methods of the invention. In particular, NMR can be used, for example, to determine the three dimensional structure, the conformational state, the aggregation level, the state of protein folding/unfolding or the dynamic properties of a polypeptide. For example, the present invention contemplates a method for determining three dimensional structure information of a polypeptide of the invention, the method comprising: (a) generating a purified isotopically labeled polypeptide of the invention; and (b) subjecting the polypeptide to NMR spectroscopic analysis, thereby determining information about its three dimensional structure.

[0745] Interaction between a polypeptide and another molecule can also be monitored using NMR. Thus, the invention encompasses methods for detecting, designing and characterizing interactions between a polypeptide and another molecule, including polypeptides, nucleic acids and small molecules, utilizing NMR techniques. For example, the present invention contemplates a method for determining three dimensional structure information of a polypeptide of the invention, or a fragment thereof, while the polypeptide is complexed with another molecule, the method comprising: (a) generating a purified isotopically labeled polypeptide of the invention, or a fragment thereof; (b) forming a complex between the polypeptide and the other molecule; and (c) subjecting the complex to NMR spectroscopic analysis, thereby determining information about the three dimensional structure of the polypeptide. In another aspect, the present invention contemplates a method for identifying compounds that bind to a polypeptide of the invention, or a fragment thereof, the method comprising: (a) generating a first NMR spectrum of an isotopically labeled polypeptide of the invention, or a fragment thereof; (b) exposing the polypeptide to one or more chemical compounds; (c) generating a second NMR spectrum of the polypeptide which has been exposed to one or more chemical compounds; and (d) comparing the first and second spectra to determine differences between the first and the second spectra, wherein the differences are indicative of one or more compounds that have bound to the polypeptide.

[0746] Briefly, the NMR technique involves placing the material to be examined (usually in a suitable solvent) in a powerful magnetic field and irradiating it with radio frequency (rf) electromagnetic radiation. The nuclei of the various atoms will align themselves with the magnetic field until energized by the rf radiation. They then absorb this resonant energy and re-radiate it at a frequency dependent on i) the type of nucleus and ii) its atomic environment. Moreover, resonant energy may be passed from one nucleus to another, either through bonds or through three-dimensional space, thus giving information about the environment-of a particular nucleus and nuclei in its vicinity.

[0747] However, it is important to recognize that not all nuclei are NMR active. Indeed, not all isotopes of the same element are active. For example, whereas “ordinary” hydrogen, ¹H, is NMR active, heavy hydrogen (deuterium), ²H, is not active in the same way. Thus, any material that normally contains ¹H hydrogen may be rendered “invisible” in the hydrogen NMR spectrum by replacing all or almost all the ¹H hydrogens with ²H. It is for this reason that NMR spectroscopic analyses of water-soluble materials frequently are performed in ²H₂O (or deuterium) to eliminate the water signal.

[0748] Conversely, “ordinary” carbon, ¹²C, is NMR inactive whereas the stable isotope, ¹³C, present to about 1% of total carbon in nature, is active. Similarly, while “ordinary” nitrogen, ¹⁴N, is NMR active, it has undesirable properties for NMR and resonates at a different frequency from the stable isotope ¹⁵N, present to about 0.4% of total nitrogen in nature.

[0749] By labeling proteins with ¹⁵N and ¹⁵N/¹³C, it is possible to conduct analytical NMR of macromolecules with weights of 15 kD and 40 kD, respectively. More recently, partial deuteration of the protein in addition to ¹³C- and ¹⁵N-labeling has increased the possible weight of proteins and protein complexes for NMR analysis still further, to approximately 60-70 kD. See Shan et al., J. Am. Chem.Soc., 118:6570-6579 (1996); L. E. Kay, Methods Enzymol., 339:174-203 (2001); and K. H. Gardner & L. E. Kay, Annu Rev Biophys Biomol Struct., 27:357-406 (1998); and references cited therein.

[0750] Isotopic substitution may be accomplished by growing a bacterium or yeast or other type of cultured cells, transformed by genetic engineering to produce the protein of choice, in a growth medium containing ³C-, ¹⁵N- and/or ²H-labeled substrates. In certain instances, bacterial growth media consists of ¹³C-labeled glucose and/or ¹⁵N-labeled ammonium salts dissolved in D₂O where necessary. Kay, L. et al., Science, 249:411 (1990) and references therein and Bax, A., J. Am. Chem. Soc., 115, 4369 (1993). More recently, isotopically labeled media especially adapted for the labeling of bacterially produced macromolecules have been described. See U.S. Pat. No. 5,324,658.

[0751] The goal of these methods has been to achieve universal and/or random isotopic enrichment of all of the amino acids of the protein. By contrast, other methods allow only certain residues to be relatively enriched in ¹H, ²H, ¹³C and ¹⁵N. For example, Kay et al., J. Mol. Biol., 263, 627-636 (1996) and Kay et al., J. Am. Chem. Soc., 119, 7599-7600 (1997) have described methods whereby isoleucine, alanine, valine and leucine residues in a protein may be labeled with ²H, ¹³C and ¹⁵N, and may be specifically labeled with ¹H at the terminal methyl position. In this way, study of the proton-proton interactions between some amino acids may be facilitated. Similarly, a cell-free system has been described by Yokoyama et al., J. Biomol. NMR, 6(2), 129-134 (1995), wherein a transcription-translation system derived from E. coli was used to express human Ha-Ras protein incorporating ¹⁵N into serine and/or aspartic acid.

[0752] Techniques for producing isotopically labeled proteins and macromolecules, such as glycoproteins, in mammalian or insect cells have been described. See U.S. Pat. Nos. 5,393,669 and 5,627,044; Weller, C. T., Biochem., 35, 8815-23 (1996) and Lustbader, J. W., J.Biomol. NMR, 7, 295-304 (1996). Other methods for producing polypeptides and other molecules with labels appropriate for NMR are known in the art.

[0753] The present invention contemplates using a variety of solvents which are appropriate for NMR. For ¹H NMR, a deuterium lock solvent may be used. Exemplary deuterium lock solvents include acetone (CD₃COCD₃), chloroform (CDCl₃), dichloro methane (CD₂Cl₂), methylnitrile (CD₃CN), benzene (C₆D₆), water (D₂O), diethylether ((CD₃CD₂)₂O), dimethylether ((CD₃)₂O), N,N-dimethylformamide ((CD₃)₂NCDO), dimethyl sulfoxide (CD₃SOCD₃), ethanol (CD₃CD₂OD), methanol (CD₃OD), tetrahydrofuran (C₄D₈O), toluene (C₆D₅CD₃), pyridine (C₅D₅N) and cyclohexane (C₆H₁₂). For example, the present invention contemplates a composition comprising a polypeptide of the invention and a deuterium lock solvent.

[0754] The 2-dimensional ¹H-¹⁵N HSQC (Heteronuclear Single Quantum Correlation) spectrum provides a diagnostic fingerprint of conformational state, aggregation level, state of protein folding, and dynamic properties of a polypeptide (Yee et al, PNAS 99, 1825-30 (2002)). Polypeptides in aqueous solution usually populate an ensemble of 3-dimensional structures which can be determined by NMR. When the polypeptide is a stable globular protein or domain of a protein, then the ensemble of solution structures is one of very closely related conformations. In this case, one peak is expected for each non-proline residue with a dispersion of resonance frequencies with roughly equal intensity. Additional pairs of peaks from side-chain NH₂ groups are also often observed, and correspond to the approximate number of Gln and Asn residues in the protein. This type of HSQC spectra usually indicates that the protein is amenable to structure determination by NMR methods.

[0755] If the HSQC spectrum shows well-dispersed peaks but there are either too few or too many in number, and/or the peak intensities differ throughout the spectrum, then the protein likely does not exist in a single globular conformation. Such spectral features are indicative of conformational heterogeneity with slow or nonexistent inter-conversion between states (too many peaks) or the presence of dynamic processes on an intermediate timescale that can broaden and obscure the NMR signals. Proteins with this type of spectrum can sometimes be stabilized into a single conformation by changing either the protein construct, the solution conditions, temperature or by binding of another molecule.

[0756] The ¹H—¹⁵N HSQC can also indicate whether a protein has formed large nonspecific aggregates or has dynamic properties. Alternatively, proteins that are largely unfolded, e.g., having very little regular secondary structure, result in ¹H—¹⁵N HSQC spectra in which the peaks are all very narrow and intense, but have very little spectral dispersion in the ¹⁵N-dimension. This reflects the fact that many or most of the amide groups of amino acids in unfolded polypeptides are solvent exposed and experience similar chemical environments resulting in similar ¹H chemical shifts.

[0757] The use of the ¹H—¹⁵N HSQC, can thus allow the rapid characterization of the conformational state, aggregation level, state of protein folding, and dynamic properties of a polypeptide. Additionally, other 2D spectra such as ¹H—¹³C HSQC, or HNCO spectra can also be used in a similar manner. Further use of the ¹H—¹⁵N HSQC combined with relaxation measurements can reveal the molecular rotational correlation time and dynamic properties of polypeptides. The rotational correlation time is proportional to size of the protein and therefore can reveal if it forms specific homo-oligomers such as homodimers, homotetramers, etc.

[0758] The structure of stable globular proteins can be determined through a series of well-described procedures. For a general review of structure determination of globular proteins in solution by NMR spectroscopy, see Wüthrich, Science 243: 45-50 (1989). See also, Billeter et al., J. Mol. Biol. 155: 321-346 (1982). Current methods for structure determination usually require the complete or nearly complete sequence-specific assignment of ¹H-resonance frequencies of the protein and subsequent identification of approximate inter-hydrogen distances (from nuclear Overhauser effect (NOE) spectra) for use in restrained molecular dynamics calculations of the protein conformation. One approach for the analysis of NMR resonance assignments was first outlined by Wüthrich, Wagner and co-workers (Wüthrich, “NMR or proteins and nucleic acids” Wiley, New York, N.Y. (1986); Wüthrich, Science 243: 45-50 (1989); Billeter et al., J. Mol. Biol. 155: 321-346 (1982)). Newer methods for determining the structures of globular proteins include the use of residual dipolar coupling restraints (Tian et al., J Am Chem Soc. 2001 Nov. 28;123(47):11791-6; Bax et al, Methods Enzymol. 2001;339:127-74) and empirically derived conformational restraints (Zweckstetter & Bax, J Am Chem Soc. 2001 Sep. 26;123(38):9490-1). It has also been shown that it may be possible to determine structures of globular proteins using only un-assigned NOE measurements. NMR may also be used to determine ensembles of many inter-converting, unfolded conformations (Choy and Forman-Kay, J Mol Biol. 2001 May 18;308(5):1011-32).

[0759] NMR analysis of a polypeptide in the presence and absence of a test compound (e.g., a polypeptide, nucleic acid or small molecule) may be used to characterize interactions between a polypeptide and another molecule. Because the ¹H-¹⁵N HSQC spectrum and other simple 2D NMR experiments can be obtained very quickly (on the order of minutes depending on protein concentration and NMR instrumentation), they are very useful for rapidly testing whether a polypeptide is able to bind to another molecule. Changes in the resonance frequency (in one or both dimensions) of one or more peaks in the HSQC spectrum indicate an interaction with another molecule. Often only a subset of the peaks will have changes in resonance frequency upon binding to anther molecule, allowing one to map onto the structure those residues directly involved in the interaction or involved in conformational changes as a result of the interaction. If the interacting molecule is relatively large (protein or nucleic acid) the peak widths will also broaden due to the increased rotational correlation time of the complex. In some cases the peaks involved in the interaction may actually disappear from the NMR spectrum if the interacting molecule is in intermediate exchange on the NMR timescale (i.e., exchanging on and off the polypeptide at a frequency that is similar to the resonance frequency of the monitored nuclei).

[0760] To facilitate the acquisition of NMR data on a large number of compounds (e.g., a library of synthetic or naturally-occurring small organic compounds), a sample changer may be employed. Using the sample changer, a larger number of samples, numbering 60 or more, may be run unattended. To facilitate processing of the NMR data, computer programs are used to transfer and automatically process the multiple one-dimensional NMR data.

[0761] In one embodiment, the invention provides a screening method for identifying small molecules capable of interacting with a polypeptide of the invention. In one example, the screening process begins with the generation or acquisition of either a T₂-filtered or a diffusion-filtered one-dimensional proton spectrum of the compound or mixture of compounds. Means for generating T₂-filtered or diffusion-filtered one-dimensional proton spectra are well known in the art (see, e.g., S. Meiboom and D. Gill, Rev. Sci. Instrum. 29:688(1958), S. J. Gibbs and C. S. Johnson, Jr. J. Main. Reson. 93:395-402 (1991) and A. S. Altieri, et al. J. Am. Chem. Soc. 117: 7566-7567 (1995)).

[0762] Following acquisition of the first spectrum for the molecules, the ¹⁵N- or ¹³C-labeled polypeptide is exposed to one or more molecules. Where more than one test compound is to be tested simultaneously, it is preferred to use a library of compounds such as a plurality of small molecules. Such molecules are typically dissolved in perdeuterated dimethylsulfoxide. The compounds in the library may be purchased from vendors or created according to desired needs.

[0763] Individual compounds may be selected inter alia on the basis of size and molecular diversity for maximizing the possibility of discovering compounds that interact with widely diverse binding sites of a subject amino acid sequence or other polypeptides of the invention.

[0764] The NMR screening process of the present invention utilizes a range of test compound concentrations, e.g., from about 0.05 to about 1.0 mM. At those exemplary concentrations, compounds which are acidic or basic may significantly change the pH of buffered protein solutions. Chemical shifts are sensitive to pH changes as well as direct binding interactions, and false-positive chemical shift changes, which are not the result of test compound binding but of changes in pH, may therefore be observed. It may therefore be necessary to ensure that the pH of the buffered solution does not change upon addition of the test compound.

[0765] Following exposure of the test compounds to a polypeptide (e.g., the target molecule for the experiment) a second one-dimensional T₂- or diffusion-filtered spectrum is generated. For the T₂-filtered approach, that second spectrum is generated in the same manner as set forth above. The first and second spectra are then compared to determine whether there are any differences between the two spectra. Differences in the one-dimensional T₂-filtered spectra indicate that the compound is binding to, or otherwise interacting with, the target molecule. Those differences are determined using standard procedures well known in the art. For the diffusion-filtered method, the second spectrum is generated by looking at the spectral differences between low and high gradient strengths—thus selecting for those compounds whose diffusion rates are comparable to that observed in the absence of target molecule.

[0766] To discover additional molecules that bind to the protein, molecules are selected for testing based on the structure/activity relationships from the initial screen and/or structural information on the initial leads when bound to the protein. By way of example, the initial screening may result in the identification of compounds, all of which contain an aromatic ring. The second round of screening would then use other aromatic molecules as the test compounds.

[0767] In another embodiment, the methods of the invention utilize a process for detecting the binding of one ligand to a polypeptide in the presence of a second ligand. In accordance with this embodiment, a polypeptide is bound to the second ligand before exposing the polypeptide to the test compounds.

[0768] For more information on NMR methods encompassed by the present invention, see also: U.S. Pat. Nos. 5,668,734; 6,194,179; 6,162,627; 6,043,024; 5,817,474; 5,891,642; 5,989,827; 5,891,643; 6,077,682; WO 00/05414; WO 99/22019; Cavanagh, et al., Protein NMR Spectroscopy, Principles and Practice, 1996, Academic Press; Clore, et al., NMR of Proteins. In Topics in Molecular and Structural Biology, 1993, S. Neidle, Fuller, W., and Cohen, J. S., eds., Macmillan Press, Ltd., London; and Christendat et al., Nature Structural Biology 7: 903-909 (2000).

[0769] (c) Analysis of Proteins by X-ray Crystallography

[0770] (i) X-ray Structure Determination

[0771] Exemplary methods for obtaining the three dimensional structure of the crystalline form of a molecule or complex are described herein and, in view of this specification, variations on these methods will be apparent to those skilled in the art (see Ducruix and Geige 1992, IRL Press, Oxford, England).

[0772] A variety of methods involving x-ray crystallography are contemplated by the present invention. For example, the present invention contemplates producing a crystallized polypeptide of the invention, or a fragment thereof, by: (a) introducing into a host cell an expression vector comprising a nucleic acid encoding for a polypeptide of the invention, or a fragment thereof; (b) culturing the host cell in a cell culture medium to express the polypeptide or fragment; (c) isolating the polypeptide or fragment from the cell culture; and (d) crystallizing the polypeptide or fragment thereof. Alternatively, the present invention contemplates determining the three dimensional structure of a crystallized polypeptide of the invention, or a fragment thereof, by: (a) crystallizing a polypeptide of the invention, or a fragment thereof, such that the crystals will diffract x-rays to a resolution of 3.5 Å or better; and (b) analyzing the polypeptide or fragment by x-ray diffraction to determine the three-dimensional structure of the crystallized polypeptide.

[0773] X-ray crystallography techniques generally require that the protein molecules be available in the form of a crystal. Crystals may be grown from a solution containing a purified polypeptide of the invention, or a fragment thereof (e.g., a stable domain), by a variety of conventional processes. These processes include, for example, batch, liquid, bridge, dialysis, vapour diffusion (e.g., hanging drop or sitting drop methods). (See for example, McPherson, 1982 John Wiley, New York; McPherson, 1990, Eur. J. Biochem. 189: 1-23; Webber. 1991, Adv. Protein Chem. 41:1-36).

[0774] In certain embodiments, native crystals of the invention may be grown by adding precipitants to the concentrated solution of the polypeptide. The precipitants are added at a concentration just below that necessary to precipitate the protein. Water may be removed by controlled evaporation to produce precipitating conditions, which are maintained until crystal growth ceases.

[0775] The formation of crystals is dependent on a number of different parameters, including pH, temperature, protein concentration, the nature of the solvent and precipitant, as well as the presence of added ions or ligands to the protein. In addition, the sequence of the polypeptide being crystallized will have a significant affect on the success of obtaining crystals. Many routine crystallization experiments may be needed to screen all these parameters for the few combinations that might give crystal suitable for x-ray diffraction analysis (See, for example, Jancarik, J & Kim, S. H., J. Appl. Cryst. 1991 24: 409-411).

[0776] Crystallization robots may automate and speed up the work of reproducibly setting up large number of crystallization experiments. Once some suitable set of conditions for growing the crystal are found, variations of the condition may be systematically screened in order to find the set of conditions which allows the growth of sufficiently large, single, well ordered crystals. In certain instances, a polypeptide of the invention is co-crystallized with a compound that stabilizes the polypeptide.

[0777] A number of methods are available to produce suitable radiation for x-ray diffraction. For example, x-ray beams may be produced by synchrotron rings where electrons (or positrons) are accelerated through an electromagnetic field while traveling at close to the speed of light. Because the admitted wavelength may also be controlled, synchrotrons may be used as a tunable x-ray source (Hendrickson W A., Trends Biochem Sci 2000 Dec.; 25(12):637-43). For less conventional Laue diffraction studies, polychromatic x-rays covering a broad wavelength window are used to observe many diffraction intensities simultaneously (Stoddard, B. L., Curr. Opin. Struct Biol 1998 Oct.; 8(5):612-8). Neutrons may also be used for solving protein crystal structures (Gutberlet T, Heinemann U & Steiner M., Acta Crystallogr D 2001;57: 349-54).

[0778] Before data collection commences, a protein crystal may be frozen to protect it from radiation damage. A number of different cryo-protectants may be used to assist in freezing the crystal, such as methyl pentanediol (MPD), isopropanol, ethylene glycol, glycerol, formate, citrate, mineral oil, or a low-molecular-weight polyethylene glycol (PEG). The present invention contemplates a composition comprising a polypeptide of the invention and a cryo-protectant. As an alternative to freezing the crystal, the crystal may also be used for diffraction experiments performed at temperatures above the freezing point of the solution. In these instances, the crystal may be protected from drying out by placing it in a narrow capillary of a suitable material (generally glass or quartz) with some of the crystal growth solution included in order to maintain vapour pressure.

[0779] X-ray diffraction results may be recorded by a number of ways know to one of skill in the art. Examples of area electronic detectors include charge coupled device detectors, multi-wire area detectors and phosphoimager detectors (Amemiya, Y, 1997. Methods in Enzymology, Vol. 276. Academic Press, San Diego, pp. 233-243; Westbrook, E. M., Naday, I. 1997. Methods in Enzymology, Vol. 276. Academic Press, San Diego, pp. 244-268; 1997. Kahn, R. & Fourme, R. Methods in Enzymology, Vol. 276. Academic Press, San Diego, pp. 268-286).

[0780] A suitable system for laboratory data collection might include a Bruker AXS Proteum R system, equipped with a copper rotating anode source, Confocal Max-Flux™ optics and a SMART 6000 charge coupled device detector. Collection of x-ray diffraction patterns are well documented by those skilled in the art (See, for example, Ducruix and Geige, 1992, IRL Press, Oxford, England).

[0781] The theory behind diffraction by a crystal upon exposure to x-rays is well known. Because phase information is not directly measured in the diffraction experiment, and is needed to reconstruct the electron density map, methods that can recover this missing information are required. One method of solving structures ab initio are the real/reciprocal space cycling techniques. Suitable real/reciprocal space cycling search programs include shake-and-bake (Weeks C M, DeTitta G T, Hauptman H A, Thuman P, Miller R Acta Crystallogr A 1994; V50: 210-20).

[0782] Other methods for deriving phases may also be needed. These techniques generally rely on the idea that if two or more measurements of the same reflection are made where strong, measurable, differences are attributable to the characteristics of a small subset of the atoms alone, then the contributions of other atoms can be, to a first approximation, ignored, and positions of these atoms may be determined from the difference in scattering by one of the above techniques. Knowing the position and scattering characteristics of those atoms, one may calculate what phase the overall scattering must have had to produce the observed differences.

[0783] One version of this technique is isomorphous replacement technique, which requires the introduction of new, well ordered, x-ray scatterers into the crystal. These additions are usually heavy metal atoms, (so that they make a significant difference in the diffraction pattern); and if the additions do not change the structure of the molecule or of the crystal cell, the resulting crystals should be isomorphous. Isomorphous replacement experiments are usually performed by diffusing different heavy-metal metals into the channels of a pre-existing protein crystal. Growing the crystal from protein that has been soaked in the heavy atom is also possible (Petsko, G. A., 1985. Methods in Enzymology, Vol. 114. Academic Press, Orlando, pp. 147-156). Alternatively, the heavy atom may also be reactive and attached covalently to exposed amino acid side chains (such as the sulfur atom of cysteine) or it may be associated through non-covalent interactions. It is sometimes possible to replace endogenous light metals in metallo-proteins with heavier ones, e.g., zinc by mercury, or calcium by samarium (Petsko, G. A., 1985. Methods in Enzymology, Vol. 114. Academic Press, Orlando, pp. 147-156). Exemplary sources for such heavy compounds include, without limitation, sodium bromide, sodium selenate, trimethyl lead acetate, mercuric chloride, methyl mercury acetate, platinum tetracyanide, platinum tetrachloride, nickel chloride, and europium chloride.

[0784] A second technique for generating differences in scattering involves the phenomenon of anomalous scattering. X-rays that cause the displacement of an electron in an inner shell to a higher shell are subsequently rescattered, but there is a time lag that shows up as a phase delay. This phase delay is observed as a (generally quite small) difference in intensity between reflections known as Friedel mates that would be identical if no anomalous scattering were present. A second effect related to this phenomenon is that differences in the intensity of scattering of a given atom will vary in a wavelength dependent manner, given rise to what are known as dispersive differences. In principle anomalous scattering occurs with all atoms, but the effect is strongest in heavy atoms, and may be maximized by using x-rays at a wavelength where the energy is equal to the difference in energy between shells. The technique therefore requires the incorporation of some heavy atom much as is needed for isomorphous replacement, although for anomalous scattering a wider variety of atoms are suitable, including lighter metal atoms (copper, zinc, iron) in metallo-proteins. One method for preparing a protein for anomalous scattering involves replacing the methionine residues in whole or in part with selenium containing seleno-methionine. Soaks with halide salts such as bromides and other non-reactive ions may also be effective (Dauter Z, Li M, Wlodawer A., Acta Crystallogr D 2001; 57: 239-49).

[0785] In another process, known as multiple anomalous scattering or MAD, two to four suitable wavelengths of data are collected. (Hendrickson, W. A. and Ogata, C. M. 1997 Methods in Enzymology 276, 494-523). Phasing by various combinations of single and multiple isomorphous and anomalous scattering are possible too. For example, SIRAS (single isomorphous replacement with anomalous scattering) utilizes both the isomorphous and anomalous differences for one derivative to derive phases. More traditionally, several different heavy atoms are soaked into different crystals to get sufficient phase information from isomorphous differences while ignoring anomalous scattering, in the technique known as multiple isomorphous replacement (MIR) (Petsko, G. A., 1985. Methods in Enzymology, Vol. 114. Academic Press, Orlando, pp. 147-156).

[0786] Additional restraints on the phases may be derived from density modification techniques. These techniques use either generally known features of electron density distribution or known facts about that particular crystal to improve the phases. For example, because protein regions of the crystal scatter more strongly than solvent regions, solvent flattening/flipping may be used to adjust phases to make solvent density a uniform flat value (Zhang, K. Y. J., Cowtan, K. and Main, P. Methods in Enzymology 277, 1997 Academic Press, Orlando pp 53-64). If more than one molecule of the protein is present in the asymmetric unit, the fact that the different molecules should be virtually identical may be exploited to further reduce phase error using non-crystallographic symmetry averaging (Villieux, F. M. D. and Read, R. J. Methods in Enzymology 277, 1997 Academic Press, Orlando pp18-52). Suitable programs for performing these processes include DM and other programs of the CCP4 suite (Collaborative Computational Project, Number 4. 1994. Acta Cryst. D50, 760-763) and CNX.

[0787] The unit cell dimensions, symmetry, vector amplitude and derived phase information can be used in a Fourier transform function to calculate the electron density in the unit cell, i.e., to generate an experimental electron density map. This may be accomplished using programs of the CNX or CCP4 packages. The resolution is measured in Ångstrom (Å) units, and is closely related to how far apart two objects need to be before they can be reliably distinguished. The smaller this number is, the higher the resolution and therefore the greater the amount of detail that can be seen. Preferably, crystals of the invention diffract x-rays to a resolution of better than about 4.0, 3.5, 3.0, 2.5, 2.0, 1.5, 1.0, 0.5 Å or better.

[0788] As used herein, the term “modeling” includes the quantitative and qualitative analysis of molecular structure and/or function based on atomic structural information and interaction models. The term “modeling” includes conventional numeric-based molecular dynamic and energy minimization models, interactive computer graphic models, modified molecular mechanics models, distance geometry and other structure-based constraint models.

[0789] Model building may be accomplished by either the crystallographer using a computer graphics program such as TURBO or O (Jones, T A. et al., Acta Crystallogr. A47, 100-119, 1991) or, under suitable circumstances, by using a fully automated model building program, such as wARP (Anastassis Perrakis, Richard Morris & Victor S. Lamzin; Nature Structural Biology, May 1999 Volume 6 Number 5 pp 458-463) or MAID (Levitt, D. G., Acta Crystallogr. D 2001 V57: 1013-9). This structure may be used to calculate model-derived diffraction amplitudes and phases. The model-derived and experimental diffraction amplitudes may be compared and the agreement between them can be described by a parameter referred to as R-factor. A high degree of correlation in the amplitudes corresponds to a low R-factor value, with 0.0 representing exact agreement and 0.59 representing a completely random structure. Because the R-factor may be lowered by introducing more free parameters into the model, an unbiased, cross-correlated version of the R-factor known as the R-free gives a more objective measure of model quality. For the calculation of this parameter a subset of reflections (generally around 10%) are set aside at the beginning of the refinement and not used as part of the refinement target. These reflections are then compared to those predicted by the model (Kleywegt G J, Brunger A T, Structure 1996 Aug. 15;4(8):897-904).

[0790] The model may be improved using computer programs that maximize the probability that the observed data was produced from the predicted model, while simultaneously optimizing the model geometry. For example, the CNX program may be used for model refinement, as can the XPLOR program (1992, Nature 355:472-475, G. N. Murshudov, A. A. Vagin and E. J. Dodson, (1997) Acta Cryst. D 53, 240-255). In order to maximize the convergence radius of refinement, simulated annealing refinement using torsion angle dynamics may be employed in order to reduce the degrees of freedom of motion of the model (Adams P D, Pannu N S, Read R J, Brunger A T., Proc Natl Acad Sci U S A 1997 May 13;94(10):5018-23). Where experimental phase information is available (e.g. where MAD data was collected) Hendrickson-Lattman phase probability targets may be employed. Isotropic or anisotropic domain, group or individual temperature factor refinement, may be used to model variance of the atomic position from its mean. Well defined peaks of electron density not attributable to protein atoms are generally modeled as water molecules. Water molecules may be found by manual inspection of electron density maps, or with automatic water picking routines. Additional small molecules, including ions, cofactors, buffer molecules or substrates may be included in the model if sufficiently unambiguous electron density is observed in a map.

[0791] In general, the R-free is rarely as low as 0.15 and may be as high as 0.35 or greater for a reasonably well-determined protein structure. The residual difference is a consequence of approximations in the model (inadequate modeling of residual structure in the solvent, modeling atoms as isotropic Gaussian spheres, assuming all molecules are identical rather than having a set of discrete conformers, etc.) and errors in the data (Lattman E E., Proteins 1996; 25: i-ii). In refined structures at high resolution, there are usually no major errors in the orientation of individual residues, and the estimated errors in atomic positions are usually around 0.1-0.2 up to 0.3 Å.

[0792] The three dimensional structure of a new crystal may be modeled using molecular replacement. The term “molecular replacement” refers to a method that involves generating a preliminary model of a molecule or complex whose structure coordinates are unknown, by orienting and positioning a molecule whose structure coordinates are known within the unit cell of the unknown crystal, so as best to account for the observed diffraction pattern of the unknown crystal. Phases may then be calculated from this model and combined with the observed amplitudes to give an approximate Fourier synthesis of the structure whose coordinates are unknown. This, in turn, can be subject to any of the several forms of refinement to provide a final, accurate structure of the unknown crystal. Lattman, E., “Use of the Rotation and Translation Functions”, in Methods in Enzymology, 115, pp. 55-77 (1985); M. G. Rossmann, ed., “The Molecular Replacement Method”, Int. Sci. Rev. Ser., No. 13, Gordon & Breach, New York, (1972).

[0793] Commonly used computer software packages for molecular replacement are CNX, X-PLOR (Brunger 1992, Nature 355: 472-475), AMoRE (Navaza, 1994, Acta Crystallogr. A50:157-163), the CCP4 package, the MERLOT package (P. M. D. Fitzgerald, J. Appl. Cryst., Vol. 21, pp. 273-278, 1988) and XTALVIEW (McCree et al (1992) J. Mol. Graphics 10: 44-46). The quality of the model may be analyzed using a program such as PROCHECK or 3D-Profiler (Laskowski et al 1993 J. Appl. Cryst. 26:283-291; Luthy R. et al, Nature 356: 83-85, 1992; and Bowie, J. U. et al, Science 253: 164-170, 1991).

[0794] Homology modeling (also known as comparative modeling or knowledge-based modeling) methods may also be used to develop a three dimensional model from a polypeptide sequence based on the structures of known proteins. The method utilizes a computer model of a known protein, a computer representation of the amino acid sequence of the polypeptide with an unknown structure, and standard computer representations of the structures of amino acids. This method is well known to those skilled in the art (Greer, 1985, Science 228, 1055; Bundell et al 1988, Eur. J. Biochem. 172, 513; Knighton et al., 1992, Science 258:130-135, http://biochem.vt.edu/courses/-modeling/homology.htn). Computer programs that can be used in homology modeling are QUANTA and the Homology module in the Insight II modeling package distributed by Molecular Simulations Inc, or MODELLER (Rockefeller University, www.iucr.ac.uk/sinris-top/logical/prg-modeller.html).

[0795] Once a homology model has been generated it is analyzed to determine its correctness. A computer program available to assist in this analysis is the Protein Health module in QUANTA which provides a variety of tests. Other programs that provide structure analysis along with output include PROCHECK and 3D-Profiler (Luthy R. et al, Nature 356: 83-85, 1992; and Bowie, J. U. et al, Science 253: 164-170, 1991). Once any irregularities have been resolved, the entire structure may be further refined.

[0796] Other molecular modeling techniques may also be employed in accordance with this invention. See, e.g., Cohen, N. C. et al, J. Med. Chem., 33, pp. 883-894 (1990). See also, Navix, M. A. and M. A. Marko, Current Opinions in Structural Biology, 2, pp. 202-210 (1992).

[0797] Under suitable circumstances, the entire process of solving a crystal structure may be accomplished in an automated fashion by a system such as ELVES (http://ucxray.berkeley.edu/˜jamesh/elves/index.html) with little or no user intervention.

[0798] (ii) X-ray Structure

[0799] The present invention provides methods for determining some or all of the structural coordinates for amino acids of a polypeptide of the invention, or a complex thereof.

[0800] In another aspect, the present invention provides methods for identifying a druggable region of a polypeptide of the invention. For example, one such method includes: (a) obtaining crystals of a polypeptide of the invention or a fragment thereof such that the three dimensional structure of the crystallized protein can be determined to a resolution of 3.5 Å or better; (b) determining the three dimensional structure of the crystallized polypeptide or fragment using x-ray diffraction; and (c) identifying a druggable region of a polypeptide of the invention based on the three-dimensional structure of the polypeptide or fragment.

[0801] A three dimensional structure of a molecule or complex may be described by the set of atoms that best predict the observed diffraction data (that is, which possesses a minimal R value). Files may be created for the structure that defines each atom by its chemical identity, spatial coordinates in three dimensions, root mean squared deviation from the mean observed position and fractional occupancy of the observed position.

[0802] Those of skill in the art understand that a set of structure coordinates for an protein, complex or a portion thereof, is a relative set of points that define a shape in three dimensions. Thus, it is possible that an entirely different set of coordinates could define a similar or identical shape. Moreover, slight variations in the individual coordinates may have little affect on overall shape. Such variations in coordinates may be generated because of mathematical manipulations of the structure coordinates. For example, structure coordinates could be manipulated by crystallographic permutations of the structure coordinates, fractionalization of the structure coordinates, integer additions or subtractions to sets of the structure coordinates, inversion of the structure coordinates or any combination of the above. Alternatively, modifications in the crystal structure due to mutations, additions, substitutions, and/or deletions of amino acids, or other changes in any of the components that make up the crystal, could also yield variations in structure coordinates. Such slight variations in the individual coordinates will have little affect on overall shape. If such variations are within an acceptable standard error as compared to the original coordinates, the resulting three-dimensional shape is considered to be structurally equivalent. It should be noted that slight variations in individual structure coordinates of a polypeptide of the invention or a complex thereof would not be expected to significantly alter the nature of modulators that could associate with a druggable region thereof. Thus, for example, a modulator that bound to the active site of a polypeptide of the invention would also be expected to bind to or interfere with another active site whose structure coordinates define a shape that falls within the acceptable error.

[0803] A crystal structure of the present invention may be used to make a structural or computer model of the polypeptide, complex or portion thereof. A model may represent the secondary, tertiary and/or quaternary structure of the polypeptide, complex or portion. The configurations of points in space derived from structure coordinates according to the invention can be visualized as, for example, a holographic image, a stereodiagram, a model or a computer-displayed image, and the invention thus includes such images, diagrams or models.

[0804] (iii) Structural Equivalents

[0805] Various computational analyses can be used to determine whether a molecule or the active site portion thereof is structurally equivalent with respect to its three-dimensional structure, to all or part of a structure of a polypeptide of the invention or a portion thereof.

[0806] For the purpose of this invention, any molecule or complex or portion thereof, that has a root mean square deviation of conserved residue backbone atoms (N, Cα, C, O) of less than about 1.75 Å, when superimposed on the relevant backbone atoms described by the reference structure coordinates of a polypeptide of the invention, is considered “structurally equivalent” to the reference molecule. That is to say, the crystal structures of those portions of the two molecules are substantially identical, within acceptable error. Alternatively, the root mean square deviation may be is less than about 1.50, 1.40, 1.25, 1.0, 0.75, 0.5 or 0.35 Å.

[0807] The term “root mean square deviation” is understood in the art and means the square root of the arithmetic mean of the squares of the deviations. It is a way to express the deviation or variation from a trend or object.

[0808] In another aspect, the present invention provides a scalable three-dimensional configuration of points, at least a portion of said points, and preferably all of said points, derived from structural coordinates of at least a portion of a polypeptide of the invention and having a root mean square deviation from the structure coordinates of the polypeptide of the invention of less than 1.50, 1.40, 1.25, 1.0, 0.75, 0.5 or 0.35 Å. In certain embodiments, the portion of a polypeptide of the invention is 25%, 33%, 50%, 66%, 75%, 85%, 90% or 95% or more of the amino acid residues contained in the polypeptide.

[0809] In another aspect, the present invention provides a molecule or complex including a druggable region of a polypeptide of the invention, the druggable region being defined by a set of points having a root mean square deviation of less than about 1.75 Å from the structural coordinates for points representing (a) the backbone atoms of the amino acids contained in a druggable region of a polypeptide of the invention, (b) the side chain atoms (and optionally the Cα atoms) of the amino acids contained in such druggable region, or (c) all the atoms of the amino acids contained in such druggable region. In certain embodiments, only a portion of the amino acids of a druggable region may be included in the set of points, such as 25%, 33%, 50%, 66%, 75%, 85%, 90% or 95% or more of the amino acid residues contained in the druggable region. In certain embodiments, the root mean square deviation may be less than 1.50, 1.40, 1.25, 1.0, 0.75, 0.5, or 0.35 Å. In still other embodiments, instead of a druggable region, a stable domain, fragment or structural motif is used in place of a druggable region.

[0810] (iv) Machine Displays and Machine Readable Storage Media

[0811] The invention provides a machine-readable storage medium including a data storage material encoded with machine readable data which, when using a machine programmed with instructions for using said data, displays a graphical three-dimensional representation of any of the molecules or complexes, or portions thereof, of this invention. In another embodiment, the graphical three-dimensional representation of such molecule, complex or portion thereof includes the root mean square deviation of certain atoms of such molecule by a specified amount, such as the backbone atoms by less than 0.8 Å. In another embodiment, a structural equivalent of such molecule, complex, or portion thereof, may be displayed. In another embodiment, the portion may include a druggable region of the polypeptide of the invention.

[0812] According to one embodiment, the invention provides a computer for determining at least a portion of the structure coordinates corresponding to x-ray diffraction data obtained from a molecule or complex, wherein said computer includes: (a) a machine-readable data storage medium comprising a data storage material encoded with machine-readable data, wherein said data comprises at least a portion of the structural coordinates of a polypeptide of the invention; (b) a machine-readable data storage medium comprising a data storage material encoded with machine-readable data, wherein said data comprises x-ray diffraction data from said molecule or complex; (c) a working memory for storing instructions for processing said machine-readable data of (a) and (b); (d) a central-processing unit coupled to said working memory and to said machine-readable data storage medium of (a) and (b) for performing a Fourier transform of the machine readable data of (a) and for processing said machine readable data of (b) into structure coordinates; and (e) a display coupled to said central-processing unit for displaying said structure coordinates of said molecule or complex. In certain embodiments, the structural coordinates displayed are structurally equivalent to the structural coordinates of a polypeptide of the invention.

[0813] In an alternative embodiment, the machine-readable data storage medium includes a data storage material encoded with a first set of machine readable data which includes the Fourier transform of the structure coordinates of a polypeptide of the invention or a portion thereof, and which, when using a machine programmed with instructions for using said data, can be combined with a second set of machine readable data including the x-ray diffraction pattern of a molecule or complex to determine at least a portion of the structure coordinates corresponding to the second set of machine readable data.

[0814] For example, a system for reading a data storage medium may include a computer including a central processing unit (“CPU”), a working memory which may be, e.g., RAM (random access memory) or “core” memory, mass storage memory (such as one or more disk drives or CD-ROM drives), one or more display devices (e.g., cathode-ray tube (“CRT”) displays, light emitting diode (“LED”) displays, liquid crystal displays (“LCDs”), electroluminescent displays, vacuum fluorescent displays, field emission displays (“FEDs”), plasma displays, projection panels, etc.), one or more user input devices (e.g., keyboards, microphones, mice, touch screens, etc.), one or more input lines, and one or more output lines, all of which are interconnected by a conventional bidirectional system bus. The system may be a stand-alone computer, or may be networked (e.g., through local area networks, wide area networks, intranets, extranets, or the internet) to other systems (e.g., computers, hosts, servers, etc.). The system may also include additional computer controlled devices such as consumer electronics and appliances.

[0815] Input hardware may be coupled to the computer by input lines and may be implemented in a variety of ways. Machine-readable data of this invention may be inputted via the use of a modem or modems connected by a telephone line or dedicated data line. Alternatively or additionally, the input hardware may include CD-ROM drives or disk drives. In conjunction with a display terminal, a keyboard may also be used as an input device.

[0816] Output hardware may be coupled to the computer by output lines and may similarly be implemented by conventional devices. By way of example, the output hardware may include a display device for displaying a graphical representation of an active site of this invention using a program such as QUANTA as described herein. Output hardware might also include a printer, so that hard copy output may be produced, or a disk drive, to store system output for later use.

[0817] In operation, a CPU coordinates the use of the various input and output devices, coordinates data accesses from mass storage devices, accesses to and from working memory, and determines the sequence of data processing steps. A number of programs may be used to process the machine-readable data of this invention. Such programs are discussed in reference to the computational methods of drug discovery as described herein. References to components of the hardware system are included as appropriate throughout the following description of the data storage medium.

[0818] Machine-readable storage devices useful in the present invention include, but are not limited to, magnetic devices, electrical devices, optical devices, and combinations thereof. Examples of such data storage devices include, but are not limited to, hard disk devices, CD devices, digital video disk devices, floppy disk devices, removable hard disk devices, magneto-optic disk devices, magnetic tape devices, flash memory devices, bubble memory devices, holographic storage devices, and any other mass storage peripheral device. It should be understood that these storage devices include necessary hardware (e.g., drives, controllers, power supplies, etc.) as well as any necessary media (e.g., disks, flash cards, etc.) to enable the storage of data.

[0819] In one embodiment, the present invention contemplates a computer readable storage medium comprising structural data, wherein the data include the identity and three-dimensional coordinates of a polypeptide of the invention or portion thereof. In another aspect, the present invention contemplates a database comprising the identity and three-dimensional coordinates of a polypeptide of the invention or a portion thereof. Alternatively, the present invention contemplates a database comprising a portion or all of the atomic coordinates of a polypeptide of the invention or portion thereof.

[0820] (v) Structurally Similar Molecules and Complexes

[0821] Structural coordinates for a polypeptide of the invention can be used to aid in obtaining structural information about another molecule or complex. This method of the invention allows determination of at least a portion of the three-dimensional structure of molecules or molecular complexes which contain one or more structural features that are similar to structural features of a polypeptide of the invention. Similar structural features can include, for example, regions of amino acid identity, conserved active site or binding site motifs, and similarly arranged secondary structural elements (e.g., α helices and β sheets). Many of the methods described above for determining the structure of a polypeptide of the invention may be used for this purpose as well.

[0822] For the present invention, a “structural homolog” is a polypeptide that contains one or more amino acid substitutions, deletions, additions, or rearrangements with respect to a subject amino acid sequence or other polypeptide of the invention, but that, when folded into its native conformation, exhibits or is reasonably expected to exhibit at least a portion of the tertiary (three-dimensional) structure of the polypeptide encoded by the related subject amino acid sequence or such other polypeptide of the invention. For example, structurally homologous molecules can contain deletions or additions of one or more contiguous or noncontiguous amino acids, such as a loop or a domain. Structurally homologous molecules also include modified polypeptide molecules that have been chemically or enzymatically derivatized at one or more constituent amino acids, including side chain modifications, backbone modifications, and N- and C-terminal modifications including acetylation, hydroxylation, methylation, amidation, and the attachment of carbohydrate or lipid moieties, cofactors, and the like.

[0823] By using molecular replacement, all or part of the structure coordinates of a polypeptide of the invention can be used to determine the structure of a crystallized molecule or complex whose structure is unknown more quickly and efficiently than attempting to determine such information ab initio. For example, in one embodiment this invention provides a method of utilizing molecular replacement to obtain structural information about a molecule or complex whose structure is unknown including: (a) crystallizing the molecule or complex of unknown structure; (b) generating an x-ray diffraction pattern from said crystallized molecule or complex; and (c) applying at least a portion of the structure coordinates for a polypeptide of the invention to the x-ray diffraction pattern to generate a three-dimensional electron density map of the molecule or complex whose structure is unknown.

[0824] In another aspect, the present invention provides a method for generating a preliminary model of a molecule or complex whose structure coordinates are unknown, by orienting and positioning the relevant portion of a polypeptide of the invention within the unit cell of the crystal of the unknown molecule or complex so as best to account for the observed x-ray diffraction pattern of the crystal of the molecule or complex whose structure is unknown.

[0825] Structural information about a portion of any crystallized molecule or complex that is sufficiently structurally similar to a portion of a polypeptide of the invention may be resolved by this method. In addition to a molecule that shares one or more structural features with a polypeptide of the invention, a molecule that has similar bioactivity, such as the same catalytic activity, substrate specificity or ligand binding activity as a polypeptide of the invention, may also be sufficiently structurally similar to a polypeptide of the invention to permit use of the structure coordinates for a polypeptide of the invention to solve its crystal structure.

[0826] In another aspect, the method of molecular replacement is utilized to obtain structural information about a complex containing a polypeptide of the invention, such as a complex between a modulator and a polypeptide of the invention (or a domain, fragment, ortholog, homolog etc. thereof). In certain instances, the complex includes a polypeptide of the invention (or a domain, fragment, ortholog, homolog etc. thereof) co-complexed with a modulator. For example, in one embodiment, the present invention contemplates a method for making a crystallized complex comprising a polypeptide of the invention, or a fragment thereof, and a compound having a molecular weight of less than 5 kDa, the method comprising: (a) crystallizing a polypeptide of the invention such that the crystals will diffract x-rays to a resolution of 3.5 Å or better; and (b) soaking the crystal in a solution comprising the compound having a molecular weight of less than 5 kDa, thereby producing a crystallized complex comprising the polypeptide and the compound.

[0827] Using homology modeling, a computer model of a structural homolog or other polypeptide can be built or refined without crystallizing the molecule. For example, in another aspect, the present invention provides a computer-assisted method for homology modeling a structural homolog of a polypeptide of the invention including: aligning the amino acid sequence of a known or suspected structural homolog with the amino acid sequence of a polypeptide of the invention and incorporating the sequence of the homolog into a model of a polypeptide of the invention derived from atomic structure coordinates to yield a preliminary model of the homolog; subjecting the preliminary model to energy minimization to yield an energy minimized model; remodeling regions of the energy minimized model where stereochemistry restraints are violated to yield a final model of the homolog.

[0828] In another embodiment, the present invention contemplates a method for determining the crystal structure of a homolog of a polypeptide encoded by a subject amino acid sequence, or equivalent thereof, the method comprising: (a) providing the three dimensional structure of a crystallized polypeptide of a subject amino acid sequence, or a fragment thereof;. (b) obtaining crystals of a homologous polypeptide comprising an amino acid sequence that is at least 80% identical to the subject amino acid sequence such that the three dimensional structure of the crystallized homologous polypeptide may be determined to a resolution of 3.5 Å or better; and (c) determining the three dimensional structure of the crystallized homologous polypeptide by x-ray crystallography based on the atomic coordinates of the three dimensional structure provided in step (a). In certain instances of the foregoing method, the atomic coordinates for the homologous polypeptide have a root mean square deviation from the backbone atoms of the polypeptide encoded by the applicable subject amino acid sequence, or a fragment thereof, of not more than 1.5 Å for all backbone atoms shared in common with the homologous polypeptide and the such encoded polypeptide, or a fragment thereof.

[0829] (vi) NMR Analysis Using X-ray Structural Data

[0830] In another aspect, the structural coordinates of a known crystal structure may be applied to nuclear magnetic resonance data to determine the three dimensional structures of polypeptides with uncharacterized or incompletely characterized structure. (See for example, Wuthrich, 1986, John Wiley and Sons, New York: 176-199; Pflugrath et al., 1986, J. Molecular Biology 189: 383-386; Kline et al., 1986 J. Molecular Biology 189:377-382). While the secondary structure of a polypeptide may often be determined by NMR data, the spatial connections between individual pieces of secondary structure are not as readily determined. The structural coordinates of a polypeptide defined by x-ray crystallography can guide the NMR spectroscopist to an understanding of the spatial interactions between secondary structural elements in a polypeptide of related structure. Information on spatial interactions between secondary structural elements can greatly simplify NOE data from two-dimensional NMR experiments. In addition, applying the structural coordinates after the determination of secondary structure by NMR techniques simplifies the assignment of NOE's relating to particular amino acids in the polypeptide sequence.

[0831] In an embodiment, the invention relates to a method of determining three dimensional structures of polypeptides with unknown structures, by applying the structural coordinates of a crystal of the present invention to nuclear magnetic resonance data of the unknown structure. This method comprises the steps of: (a) determining the secondary structure of an unknown structure using NMR data; and (b) simplifying the assignment of through-space interactions of amino acids. The term “through-space interactions” defines the orientation of the secondary structural elements in the three dimensional structure and the distances between amino acids from different portions of the amino acid sequence. The term “assignment” defines a method of analyzing NMR data and identifying which amino acids give rise to signals in the NMR spectrum.

[0832] For all of this section on x-ray crystallography, see also Brooks et al. (1983) J Comput Chem 4:187-217; Weiner et al (1981) J. Comput. Chem. 106: 765; Eisenfield et al. (1991) Am J Physiol 261:C376-386; Lybrand (1991) J Pharm Belg 46:49-54; Froimowitz (1990) Biotechniques 8:640-644; Burbam et al. (1990) Proteins 7:99-111; Pedersen (1985) Environ Health Perspect 61:185-190; and Kini et al. (1991) J Biomol Struct Dyn 9:475-488; Ryckaert et al. (1977) J Comput Phys 23:327; Van Gunsteren et al. (1977) Mol Phys 34:1311; Anderson (1983) J Comput Phys 52:24; J. Mol. Biol. 48: 442453, 1970; Dayhoff et al., Meth. Enzymol. 91: 524-545, 1983; Henikoff and Henikoff, Proc. Nat. Acad. Sci. USA 89: 10915-10919, 1992; J. Mol. Biol. 233: 716-738, 1993; Methods in Enzymology, Volume 276, Macromolecular crystallography, Part A, ISBN 0-12-182177-3 and Volume 277, Macromolecular crystallography, Part B, ISBN 0-12-182178-1, Eds. Charles W. Carter, Jr. and Robert M. Sweet (1997), Academic Press, San Diego; Pfuetzner, et al., J. Biol. Chem. 272: 430-434 (1997).

### 6. Interacting Proteins

[0833] The present invention also provides methods for isolating specific protein interactors of a polypeptide of the invention, and complexes comprising a polypeptide of the invention and one or more interacting proteins. In one aspect, the present invention contemplates an isolated protein complex comprising a polypeptide of the invention and at least one protein that interacts with the polypeptide of the invention. The interacting protein may be naturally-occurring. The interacting protein may be of the same origin of the polypeptide of the invention with which such protein interacts. Alternatively, the interacting protein may be of mammalian origin or human origin. Either the polypeptide of the invention, the interacting protein, or both, may be a fusion protein.

[0834] The present invention contemplates a method for identifying a protein capable of interacting with a polypeptide of the invention or a fragment thereof, the method comprising: (a) exposing a sample to a solid substrate coupled to a polypeptide of the invention or a fragment thereof under conditions which promote protein-protein interactions; (b) washing the solid substrate so as to remove any polypeptides interacting non-specifically with the polypeptide or fragment; (c) eluting the polypeptides which specifically interact with the polypeptide or fragment; and (d) identifying the interacting protein. The sample may be an extract from the same bacterial species as the polypeptide of the invention of interest, a mammalian cell extract, a human cell extract, a purified protein (or a fragment thereof), or a mixture of purified proteins (or fragments thereof). The interacting protein may be identified by a number of methods, including mass spectrometry or protein sequencing.

[0835] In another aspect, the present invention contemplates a method for identifying a protein capable of interacting with a polypeptide of present invention or a fragment thereof, the method comprising: (a) subjecting a sample to protein-affinity chromatography on multiple columns, the columns having a polypeptide of the invention or a fragment thereof coupled to the column matrix in varying concentrations, and eluting bound components of the extract from the columns; (b) separating the components to isolate a polypeptide capable of interacting with the polypeptide or fragment; and (c) analyzing the interacting protein by mass spectrometry to identify the interacting protein. In certain instances, the foregoing method will use polyacrylamide gel electrophoresis without SDS.

[0836] In another aspect, the present invention contemplates a method for identifying a protein capable of interacting with a polypeptide of the invention, the method comprising: (a) subjecting a cellular extract or extracellular fluid to protein-affinity chromatography on multiple columns, the columns having a polypeptide of the invention or a fragment thereof coupled to the column matrix in varying concentrations, and eluting bound components of the extract from the columns; (b) gel-separating the components to isolate an interacting protein; wherein the interacting protein is observed to vary in amount in direct relation to the concentration of coupled polypeptide or fragment; (c) digesting the interacting protein to give corresponding peptides; (d) analyzing the peptides by MALDI-TOF mass spectrometry or post source decay to determine the peptide masses; and (d) performing correlative database searches with the peptide, or peptide fragment, masses, whereby the interacting protein is identified based on the masses of the peptides or peptide fragments. The foregoing method may include the further step of including the identifies of any interacting proteins into a relational database.

[0837] In another aspect, the invention further contemplates a method for identifying modulators of a protein complex, the method comprising: (a) contacting a protein complex comprising a polypeptide of the invention and an interacting protein with one or more test compounds; and (b) determining the effect of the test compound on (i) the activity of the protein complex, (ii) the amount of the protein complex, (iii) the stability of the protein complex, (iv) the conformation of the protein complex, (v) the activity of at least one polypeptide included in the protein complex, (vi) the conformation of at least one polypeptide included in the protein complex, (vii) the intracellular localization of the protein complex or a component thereof, (viii) the transcription level of a gene dependent on the complex, and/or (ix) the level of second messenger levels in a cell; thereby identifying modulators of the protein complex. The foregoing method may be carried out in vitro or in vivo as appropriate.

[0838] Typically, it will be desirable to immobilize a polypeptide of the invention to facilitate separation of complexes comprising a polypeptide of the invention from uncomplexed forms of the interacting proteins, as well as to accommodate automation of the assay. The polypeptide of the invention, or ligand, may be immobilized onto a solid support (e.g., column matrix, microtiter plate, slide, etc.). In certain embodiments, the ligand may be purified. In certain instances, a fusion protein may be provided which adds a domain that permits the ligand to be bound to a support.

[0839] In various in vitro embodiments, the set of proteins engaged in a protein-protein interaction comprises a cell extract, a clarified cell extract, or a reconstituted protein mixture of at least semi-purified proteins. By semi-purified, it is meant that the proteins utilized in the reconstituted mixture have been previously separated from other cellular or viral proteins. For instance, in contrast to cell lysates, the proteins involved in a protein-protein interaction are present in the mixture to at least about 50% purity relative to all other proteins in the mixture, and more preferably are present in greater, even 90-95%, purity. In certain embodiments of the subject method, the reconstituted protein mixture is derived by mixing highly purified proteins such that the reconstituted mixture substantially lacks other proteins (such as of cellular or viral origin) which might interfere with or otherwise alter the ability to measure activity resulting from the given protein-protein interaction.

[0840] Complex formation involving a polypeptide of the invention and another component polypeptide or a substrate polypeptide, may be detected by a variety of techniques. For instance, modulation in the formation of complexes can be quantitated using, for example, detectably labeled proteins (e.g. radiolabeled, fluorescently labeled, or enzymatically labeled), by immunoassay, or by chromatographic detection.

[0841] The present invention also provides assays for identifying molecules which are modulators of a protein-protein interaction involving a polypeptide of the invention, or are a modulator of the role of the complex comprising a polypeptide of the invention in the infectivity or pathogenicity of the pathogenic species of origin for such polypeptide. In one embodiment, the assay detects agents which inhibit formation or stabilization of a protein complex comprising a polypeptide of the invention and one or more additional proteins. In another embodiment, the assay detects agents which modulate the intrinsic biological activity of a protein complex comprising a polypeptide of the invention, such as an enzymatic activity, binding to other cellular components, cellular compartmentalization, signal transduction, and the like. Such modulators may be used, for example, in the treatment of diseases or disorders for the pathogenic species of origin for such polypeptide. In certain embodiments, the compound is a mechanism based inhibitor which chemically alters one member of a protein-protein interaction involving a polypeptide of the invention and which is a specific inhibitor of that member, e.g. has an inhibition constant about 10-fold, 100-fold, or 1000-fold different compared to homologous proteins.

[0842] In one embodiment, proteins that interact with a polypeptide of the invention may be isolated using immunoprecipitation. A polypeptide of the invention may be expressed in its pathogenic species of origin, or in a heterologous system. The cells expressing a polypeptide of the invention are then lysed under conditions which maintain protein-protein interactions, and complexes comprising a polypeptide of the invention are isolated. For example, a polypeptide of the invention may be expressed in mammalian cells, including human cells, in order to identify mammalian proteins that interact with a polypeptide of the invention and therefore may play a role in the infectivity or proliferation of such polypeptide's species of origin. In one embodiment, a polypeptide of the invention is expressed in the cell type for which it is desirable to find interacting proteins. For example, a polypeptide of the invention may be expressed in its species of origin in order to find interacting proteins derived from such species.

[0843] In an alternative embodiment, a polypeptide of the invention is expressed and purified and then mixed with a potential interacting protein or mixture of proteins to identify complex formation. The potential interacting protein may be a single purified or semi-purified protein, or a mixture of proteins, including a mixture of purified or semi-purified proteins, a cell lysate, a clarified cell lysate, a semi-purified cell lysate, etc.

[0844] In certain embodiments, it may be desirable to use a tagged version of a polypeptide of the invention in order to facilitate isolation of complexes from the reaction mixture. Suitable tags for immunoprecipitation experiments include HA, myc, FLAG, HIS, GST, protein A, protein G, etc. Immunoprecipitation from a cell lysate or other protein mixture may be carried out using an antibody specific for a polypeptide of the invention or using an antibody which recognizes a tag to which a polypeptide of the invention is fused (e.g., anti-HA, anti-myc, anti-FLAG, etc.). Antibodies specific for a variety of tags are known to the skilled artisan and are commercially available from a number of sources. In the case where a polypeptide of the invention is fused to a His, GST, or protein A/G tag, immunoprecipitation may be carried out using the appropriate affinity resin (e.g., beads functionalized with Ni, glutathione, Fc region of IgG, etc.). Test compounds which modulate a protein-protein interaction involving a polypeptide of the invention may be identified by carrying out the immunoprecipitation reaction in the presence and absence of the test agent and comparing the level and/or activity of the protein complex between the two reactions.

[0845] In another embodiment, proteins that interact with a polypeptide of the invention may be identified using affinity chromatography. Some examples of such chromatography are described in U.S. Ser. No. 09/727,812, filed Nov. 30, 2000, and the PCT Application filed Nov. 30, 2001 and entitled “Methods for Systematic Identification of Protein-Protein Interactions and other Properties”, which claims priority to such U.S. application.

[0846] In one aspect, for affinity chromatography using a solid support, a polypeptide of the invention or a fragment thereof may be attached by a variety of means known to those of skill in the art. For example, the polypeptide may be coupled directly (through a covalent linkage) to commercially available pre-activated resins as described in Formosa et al., Methods in Enzymology 1991, 208, 24-45; Sopta et al, J. Biol. Chem. 1985, 260, 10353-60; Archambault et al., Proc. Natl. Acad. Sci. USA 1997, 94, 14300-5. Alternatively, the polypeptide may be tethered to the solid support through high affinity binding interactions. If the polypeptide is expressed fused to a tag, such as GST, the fusion tag can be used to anchor the polypeptide to the matrix support, for example Sepharose beads containing immobilized glutathione. Solid supports that take advantage of these tags are commercially available.

[0847] In another aspect, the support to which a polypeptide may be immobilized is a soluble support, which may facilitate certain steps performed in the methods of the present invention. For example, the soluble support may be soluble in the conditions employed to create a binding interaction between a target and the polypeptide, and then used under conditions in which it is a solid for elution of the proteins or other biological materials that bind to a polypeptide.

[0848] The concentration of the coupled polypeptide may have an affect on the sensitivity of the method. In certain embodiments, to detect interactions most efficiently, the concentration of the polypeptide bound to the matrix should be at least 10-fold higher than the K_{d} of the interaction. Thus, the concentration of the polypeptide bound to the matrix should be highest for the detection of the weakest protein-protein interactions. However, if the concentration of the immobilized polypeptide is not as high as may be ideal, it may still be possible to observe protein-protein interactions of interest by, for example, increasing the concentration of the polypeptide or other moiety that interacts with the coupled polypeptide. The level of detection will of course vary with each different polypeptide, interactor, conditions of the assay, etc. In certain instances, the interacting protein binds to the polypeptide with a K_{d} of about 10⁻⁵ M to about 10⁻⁸ M or 10⁻¹⁰ M.

[0849] In another aspect, the coupling may be done at various ratios of the polypeptide to the resin. An upper limit of the protein : resin ratio may be determined by the isoelectric point and the ionic nature of the protein, although it may be possible to achieve higher polypeptide concentrations by use of various methods.

[0850] In certain embodiments, several concentrations of the polypeptide immobilized on a solid or soluble support may be used. One advantage of using multiple concentrations, although not a requirement, is that one may be able to obtain an estimate for the strength of the protein-protein interaction that is observed in the affinity chromatography experiment. Another advantage of using multiple concentrations is that a binding curve which has the proper shape may indicate that the interaction that is observed is biologically important rather than a spurious interaction with denatured protein.

[0851] In one example of such an embodiment, a series of columns may be prepared with varying concentrations of polypeptide (mg polypeptide/ml resin volume). The number of columns employed may be between 2 to 8, 10, 12, 15, 25 or more, each with a different concentration of attached polypeptide. Larger numbers of columns may be used if appropriate for the polypeptide being examined, and multiple columns may be used with the same concentration as any methods may require. In certain embodiments, 4 to 6 columns are prepared with varying concentrations of polypeptide. In another aspect of this embodiment, two control columns may be prepared: one that contains no polypeptide and a second that contains the highest concentration of polypeptide but is not treated with extract. After elution of the columns and separation of the eluent components (by one of the methods described below), it may be possible to distinguish the interacting proteins (if any) from the non-specific bound proteins as follows. The concentration of the interacting proteins, as determined by the intensity of the band on the gel, will increase proportionally to the increase in polypeptide concentration but will be missing from the second control column. This allows for the identification of unknown interacting proteins.

[0852] The method of the invention may be used for small-scale analysis. A variety of column sizes, types, and geometries may be used. In addition, other vessel shapes and sizes having a smaller scale than is usually found in laboratory experiments may be used as well, including a plurality of wells in a plate. For high throughput analysis, it is advantageous to use small volumes, from about 20, 30, 50, 80 or 100 μl. Larger or small volumes may be used, as necessary, and it may be possible to achieve high throughput analysis using them. The entire affinity chromatography procedure may be automated by assembling the micro-columns into an array (e.g. with 96 micro-column arrays).

[0853] A variety of materials may be used as the source of potential interacting proteins. In one embodiment, a cellular extract or extracellular fluid may be used. The choice of starting material for the extract may be based upon the cell or tissue type or type of fluid that would be expected to contain proteins that interact with the target protein. Micro-organisms or other organisms are grown in a medium that is appropriate for that organism and can be grown in specific conditions to promote the expression of proteins that may interact with the target protein. Exemplary starting material that may be used to make a suitable extract are: 1) one or more types of tissue derived from an animal, plant, or other multi-cellular organism, 2) cells grown in tissue culture that were derived from an animal or human, plant or other source, 3) micro-organisms grown in suspension or non-suspension cultures, 4) virus-infected cells, 5) purified organelles (including, but not restricted to nuclei, mitochondria, membranes, Golgi, endoplasmic reticulum, lysosomes, or peroxisomes) prepared by differential centrifugation or another procedure from animal, plant or other kinds of eukaryotic cells, 6) serum or other bodily fluids including, but not limited to, blood, urine, semen, synovial fluid, cerebrospinal fluid, amniotic fluid, lymphatic fluid or interstitial fluid. In other embodiments, a total cell extract may not be the optimal source of interacting proteins. For example, if the ligand is known to act in the nucleus, a nuclear extract can provide a 10-fold enrichment of proteins that are likely to interact with the ligand. In addition, proteins that are present in the extract in low concentrations may be enriched using another chromatographic method to fractionate the extract before screening various pools for an interacting protein.

[0854] Extracts are prepared by methods known to those of skill in the art. The extracts may be prepared at a low temperature (e.g., 4° C.) in order to retard denaturation or degradation of proteins in the extract. The pH of the extract may be adjusted to be appropriate for the body fluid or tissue, cellular, or organellar source that is used for the procedure (e.g. pH 7-8 for cytosolic extracts from mammals, but low pH for lysosomal extracts). The concentration of chaotropic or non-chaotropic salts in the extracting solution may be adjusted so as to extract the appropriate sets of proteins for the procedure. Glycerol may be added to the extract, as it aids in maintaining the stability of many proteins and also reduces background non-specific binding. Both the lysis buffer and column buffer may contain protease inhibitors to minimize proteolytic degradation of proteins in the extract and to protect the polypeptide. Appropriate co-factors that could potentially interact with the interacting proteins may be added to the extracting solution. One or more nucleases or another reagent may be added to the extract, if appropriate, to prevent protein-protein interactions that are mediated by nucleic acids. Appropriate detergents or other agents may be added to the solution, if desired, to extract membrane proteins from the cells or tissue. A reducing agent (e.g. dithiothreitol or 2-mercaptoethanol or glutathione or other agent) may be added. Trace metals or a chelating agent may be added, if desired, to the extracting solution.

[0855] Usually, the extract is centrifuged in a centrifuge or ultracentrifuge or filtered to provide a clarified supernatant solution. This supernatant solution may be dialyzed using dialysis tubing, or another kind of device that is standard in the art, against a solution that is similar to, but may not be identical with, the solution that was used to make the extract. The extract is clarified by centrifugation or filtration again immediately prior to its use in affinity chromatography.

[0856] In some cases, the crude lysate will contain small molecules that can interfere with the affinity chromatography. This can be remedied by precipitating proteins with ammonium sulfate, centrifugation of the precipitate, and re-suspending the proteins in the affinity column buffer followed by dialysis. An additional centrifugation of the sample may be needed to remove any particulate matter prior to application to the affinity columns.

[0857] The amount of cell extract applied to the column may be important for any embodiment. If too little extract is applied to the column and the interacting protein is present at low concentration, the level of interacting protein retained by the column may be difficult to detect. Conversely, if too much extract is applied to the column, protein may precipitate on the column or competition by abundant interacting proteins for the limited amount of protein ligand may result in a difficulty in detecting minor species.

[0858] The columns functionalized with a polypeptide of the invention are loaded with protein extract from an appropriate source that has been dialyzed against a buffer that is consistent with the nature of the expected interaction. The pH, salt concentrations and the presence or absence of reducing and chelating agents, trace metals, detergents, and co-factors may be adjusted according to the nature of the expected interaction. Most commonly, the pH and the ionic strength are chosen so as to be close to physiological for the source of the extract. The extract is most commonly loaded under gravity onto the columns at a flow rate of about 4-6 column volumes per hour, but this flow rate can be adjusted for particular circumstances in an automated procedure.

[0859] The volume of the extract that is loaded on the columns can be varied but is most commonly equivalent to about 5 to 10 column volumes. When large volumes of extract are loaded on the columns, there is often an improvement in the signal-to-noise ratio because more protein from the extract is available to bind to the protein ligand, whereas the background binding of proteins from the extract to the solid support saturates with low amounts of extract.

[0860] A control column may be included that contains the highest concentration of protein ligand, but buffer rather than extract is loaded onto this column. The elutions (eluates) from this column will contain polypeptide that failed to be attached to the column in a covalent manner, but no proteins that are derived from the extract.

[0861] The columns may be washed with a buffer appropriate to the nature of the interaction being analyzed, usually, but not necessarily, the same as the loading buffer. An elution buffer with an appropriate pH, glycerol, and the presence or absence of reducing agent, chelating agent, cofactors, and detergents are all important considerations. The columns may be washed with anywhere from about 5 to 20 column volumes of each wash buffer to eliminate unbound proteins from the natural extract. The flow rate of the wash is usually adjusted to about 4 to 6 column volumes per hour by using gravity or an automated procedure, but other flow rates are possible in specific circumstances.

[0862] In order to elute the proteins that have been retained by the column, the interactions between the extract proteins and the column ligand should be disrupted. This is performed by eluting the column with a solution of salt or detergent. Retention of activity by the eluted proteins may require the presence of glycerol and a buffer of appropriate pH, as well as proper choices of ionic strength and the presence or absence of appropriate reducing agent, chelating agent, trace metals, cofactors, detergents, chaotropic agents, and other reagents. If physical identification of the bound proteins is the objective, the elution may be performed sequentially, first with buffer of high ionic strength and then with buffer containing a protein denaturant, most commonly, but not restricted to sodium dodecyl sulfate (SDS), urea, or guanidine hydrochloride. In certain instances, the column is eluted with a protein denaturant, particularly SDS, for example as a 1% SDS solution. Using only the SDS wash, and omitting the salt wash, may result in SDS-gels that have higher resolution (sharper bands with less smearing). Also, using only the SDS wash results in half as many samples to analyze. The volume of the eluting solution may be varied but is normally about 2 to 4 column volumes. For 20 ml columns, the flow rate of the eluting procedures are most commonly about 4 to 6 column volumes per hour, under gravity, but can be varied in an automated procedure.

[0863] The proteins from the extract that were bound to and are eluted from the affinity columns may be most easily resolved for identification by an electrophoresis procedure, but this procedure may be modified, replaced by another suitable method, or omitted. Any of the denaturing or non-denaturing electrophoresis procedures that are standard in the art may be used for this purpose, including SDS-PAGE, gradient gels, capillary electrophoresis, and two-dimensional gels with isoelectric focusing in the first dimension and SDS-PAGE in the second. Typically, the individual components in the column eluent are separated by polyacrylamide gel electrophoresis.

[0864] After electrophoresis, protein bands or spots may be visualized using any number of methods know to those of skill in the art, including staining techniques such as Coomassie blue or silver staining, or some other agent that is standard in the art. Alternatively, autoradiography can be used for visualizing proteins isolated from organisms cultured on media containing a radioactive label, for example ³⁵SO₄²⁻ or ³⁵[S]methionine, that is incorporated into the proteins. The use of radioactively labeled extract allows a distinction to be made between extract proteins that were retained by the column and proteolytic fragments of the ligand that may be released from the column.

[0865] Protein bands that are derived from the extract (i.e. it did not elute from the control column that was not loaded with protein from the extract) and bound to an experimental column that contained polypeptide covalently attached to the solid support, and did not bind to a control column that did not contain any polypeptide, may be excised from the stained electrophoretic gel and further characterized.

[0866] To identify the protein interactor by mass spectrometry, it may be desirable to reduce the disulfide bonds of the protein followed by alkylation of the free thiols prior to digestion of the protein with protease. The reduction may be performed by treatment of the gel slice with a reducing agent, for example with dithiothreitol, whereupon, the protein is alkylated by treating the gel slice with a suitable alkylating agent, for example iodoacetamide.

[0867] Prior to analysis by mass spectrometry, the protein may be chemically or enzymatically digested. The protein sample in the gel slice may be subjected to in-gel digestion. Shevchenko A. et al., Mass Spectrometric Sequencing of Proteins from Silver Stained Polyacrylamide Gels. Analytical Chemistry 1996, 58, 850-858. One method of digestion is by treatment with the enzyme trypsin. The resulting peptides are extracted from the gel slice into a buffer.

[0868] The peptide fragments may be purified, for example by use of chromatography. A solid support that differentially binds the peptides and not the other compounds derived from the gel slice, the protease reaction or the peptide extract may be used. The peptides may be eluted from the solid support into a small volume of a solution that is compatible with mass spectrometry (e.g. 50% acetonitrile/0.1% trifluoroacetic acid).

[0869] The preparation of a protein sample from a gel slice that is suitable for mass spectrometry may also be done by an automated procedure.

[0870] Peptide samples derived from gel slices may be analyzed by any one of a variety of techniques in mass spectrometry as further described above. This technique may be used to assign function to an unknown protein based upon the known function of the interacting protein in the same or a homologous/orthologous organism.

[0871] Eluates from the affinity chromatography columns may also be analyzed directly without resolution by electrophoretic methods, by proteolytic digestion with a protease in solution, followed by applying the proteolytic digestion products to a reverse phase column and eluting the peptides from the column.

[0872] In yet another embodiment, proteins that interact with a polypeptide of the invention may be identified using an interaction trap assay (see also, U.S. Pat. No. 5,283,317; Zervos et al. (1993) Cell 72:223-232; Madura et al. (1993) J Biol Chem 268:12046-12054; Bartel et al. (1993) Biotechniques 14:920-924; and Iwabuchi et al. (1993) Oncogene 8:1693-1696).

[0873] In another embodiment, a method of the present invention makes use of chimeric genes which express hybrid proteins. To illustrate, a first hybrid gene comprises the coding sequence for a DNA-binding domain of a transcriptional activator fused in frame to the coding sequence for a “bait” protein, e.g., a polypeptide of the invention of sufficient length to bind to a potential interacting protein. The second hybrid protein encodes a transcriptional activation domain fused in frame to a gene encoding a “fish” protein, e.g., a potential interacting protein of sufficient length to interact with a polypeptide of the invention portion of the bait fusion protein. If the bait and fish proteins are able to interact, e.g., form a protein-protein interaction, they bring into close proximity the two domains of the transcriptional activator. This proximity causes transcription of a reporter gene which is operably linked to a transcriptional regulatory site responsive to the transcriptional activator, and expression of the reporter gene can be detected and used to score for the interaction of the bait and fish proteins.

[0874] In accordance with the present invention, the method includes providing a host cell, typically a yeast cell, e.g., Kluyverei lactis, Schizosaccharomyces pombe, Ustilago maydis, Saccharomyces cerevisiae, Neurospora crassa, Aspergillus niger, Aspergillus nidulans, Pichia pastoris, Candida tropicalis, and Hansenula polymorpha, though most preferably S cerevisiae or S. pombe. The host cell contains a reporter gene having a binding site for the DNA-binding domain of a transcriptional activator used in the bait protein, such that the reporter gene expresses a detectable gene product when the gene is transcriptionally activated. The first chimeric gene may be present in a chromosome of the host cell, or as part of an expression vector.

[0875] The host cell also contains a first chimeric gene which is capable of being expressed in the host cell. The gene encodes a chimeric protein, which comprises (a) a DNA-binding domain that recognizes the responsive element on the reporter gene in the host cell, and (b) a bait protein (e.g., a polypeptide of the invention).

[0876] A second chimeric gene is also provided which is capable of being expressed in the host cell, and encodes the “fish” fusion protein. In one embodiment, both the first and the second chimeric genes are introduced into the host cell in the form of plasmids. Preferably, however, the first chimeric gene is present in a chromosome of the host cell and the second chimeric gene is introduced into the host cell as part of a plasmid.

[0877] The DNA-binding domain of the first hybrid protein and the transcriptional activation domain of the second hybrid protein may be derived from transcriptional activators having separable DNA-binding and transcriptional activation domains. For instance, these separate DNA-binding and transcriptional activation domains are known to be found in the yeast GAL4 protein, and are known to be found in the yeast GCN4 and ADR1 proteins. Many other proteins involved in transcription also have separable binding and transcriptional activation domains which make them useful for the present invention, and include, for example, the LexA and VP16 proteins. It will be understood that other (substantially) transcriptionally-inert DNA-binding domains may be used in the subject constructs; such as domains of ACE1, λcI, lac repressor, jun or fos. In another embodiment, the DNA-binding domain and the transcriptional activation domain may be from different proteins. The use of a LexA DNA binding domain provides certain advantages. For example, in yeast, the LexA moiety contains no activation function and has no known affect on transcription of yeast genes. In addition, use of LexA allows control over the sensitivity of the assay to the level of interaction (see, for example, the Brent et al. PCT publication WO94/10300).

[0878] In certain embodiments, any enzymatic activity associated with the bait or fish proteins is inactivated, e.g., dominant negative or other mutants of a protein-protein-interaction component can be used.

[0879] Continuing with the illustrative example, a polypeptide of the invention-mediated interaction, if any, between the bait and fish fusion proteins in the host cell, causes the activation domain to activate transcription of the reporter gene. The method is carried out by introducing the first chimeric gene and the second chimeric gene into the host cell, and subjecting that cell to conditions under which the bait and fish fusion proteins and are expressed in sufficient quantity for the reporter gene to be activated. The formation of a protein complex containing a polypeptide of the invention results in a detectable signal produced by the expression of the reporter gene.

[0880] In still further embodiments, the protein-protein interaction of interest is generated in whole cells, taking advantage of cell culture techniques to support the subject assay. For example, the protein-protein interaction of interest can be constituted in a prokaryotic or eukaryotic cell culture system. Advantages to generating the protein complex in an intact cell includes the ability to screen for inhibitors of the level or activity of the complex which are functional in an environment more closely approximating that which therapeutic use of the inhibitor would require, including the ability of the agent to gain entry into the cell. Furthermore, certain of the in vivo embodiments of the assay are amenable to high through-put analysis of candidate agents.

[0881] The components of the protein complex comprising a polypeptide of the invention can be endogenous to the cell selected to support the assay. Alternatively, some or all of the components can be derived from exogenous sources. For instance, fusion proteins can be introduced into the cell by recombinant techniques (such as through the use of an expression vector), as well as by microinjecting the fusion protein itself or mRNA encoding the fusion protein. Moreover, in the whole cell embodiments of the subject assay, the reporter gene construct can provide, upon expression, a selectable marker. Such embodiments of the subject assay are particularly amenable to high through-put analysis in that proliferation of the cell can provide a simple measure of the protein-protein interaction.

[0882] The amount of transcription from the reporter gene may be measured using any method known to those of skill in the art to be suitable. For example, specific mRNA expression may be detected using Northern blots or specific protein product may be identified by a characteristic stain, western blots or an intrinsic activity. In certain embodiments, the product of the reporter gene is detected by an intrinsic activity associated with that product. For instance, the reporter gene may encode a gene product that, by enzymatic activity, gives rise to a detection signal based on color, fluorescence, or luminescence.

[0883] The interaction trap assay of the invention may also be used to identify test agents capable of modulating formation of a complex comprising a polypeptide of the invention. In general, the amount of expression from the reporter gene in the presence of the test compound is compared to the amount of expression in the same cell in the absence of the test compound. Alternatively, the amount of expression from the reporter gene in the presence of the test compound may be compared with the amount of transcription in a substantially identical cell that lacks a component of the protein-protein interaction involving a polypeptide of the invention.

### 7. Antibodies

[0884] Another aspect of the invention pertains to antibodies specifically reactive with a polypeptide of the invention. For example, by using peptides based on a polypeptide of the invention, e.g., having a subject amino acid sequence or an immunogenic fragment thereof, antisera or monoclonal antibodies may be made using standard methods. An exemplary immunogenic fragment may contain eight, ten or more consecutive amino acid residues of a subject amino acid sequence. Certain fragments that are predicted to be immunogenic for the subject amino acid sequences (predicted) are set forth in the Tables contained in the Figures.

[0885] The term “antibody” as used herein is intended to include fragments thereof which are also specifically reactive with a polypeptide of the invention. Antibodies can be fragmented using conventional techniques and the fragments screened for utility in the same manner as is suitable for whole antibodies. For example, F(ab′)₂ fragments can be generated by treating antibody with pepsin. The resulting F(ab′)₂ fragment can be treated to reduce disulfide bridges to produce Fab′ fragments. The antibody of the present invention is further intended to include bispecific and chimeric molecules, as well as single chain (scFv) antibodies. Also within the scope of the invention are trimeric antibodies, humanized antibodies, human antibodies, and single chain antibodies. All of these modified forms of antibodies as well as fragments of antibodies are intended to be included in the term “antibody”.

[0886] In one aspect, the present invention contemplates a purified antibody that binds specifically to a polypeptide of the invention and which does not substantially cross-react with a protein which is less than about 80%, or less than about 90%, identical to a subject amino acid sequence. In another aspect, the present invention contemplates an array comprising a substrate having a plurality of address, wherein at least one of the addresses has disposed thereon a purified antibody that binds specifically to a polypeptide of the invention.

[0887] Antibodies may be elicited by methods known in the art. For example, a mammal such as a mouse, a hamster or rabbit may be immunized with an immunogenic form of a polypeptide of the invention (e.g., an antigenic fragment which is capable of eliciting an antibody response). Alternatively, immunization may occur by using a nucleic acid of the acid, which presumably in vivo expresses the polypeptide of the invention giving rise to the immunogenic response observed. Techniques for conferring immunogenicity on a protein or peptide include conjugation to carriers or other techniques well known in the art. For instance, a peptidyl portion of a polypeptide of the invention may be administered in the presence of adjuvant. The progress of immunization may be monitored by detection of antibody titers in plasma or serum. Standard ELISA or other immunoassays may be used with the immunogen as antigen to assess the levels of antibodies.

[0888] Following immunization, antisera reactive with a polypeptide of the invention may be obtained and, if desired, polyclonal antibodies isolated from the serum. To produce monoclonal antibodies, antibody producing cells (lymphocytes) may be harvested from an immunized animal and fused by standard somatic cell fusion procedures with immortalizing cells such as myeloma cells to yield hybridoma cells. Such techniques are well known in the art, and include, for example, the hybridoma technique (originally developed by Kohler and Milstein, (1975) Nature, 256: 495-497), as the human B cell hybridoma technique (Kozbar et al., (1983) Immunology Today, 4: 72), and the EBV-hybridoma technique to produce human monoclonal antibodies (Cole et al., (1985) Monoclonal Antibodies and Cancer Therapy, Alan R. Liss, Inc. pp. 77-96). Hybridoma cells can be screened immunochemically for production of antibodies specifically reactive with the polypeptides of the invention and the monoclonal antibodies isolated.

[0889] Antibodies directed against the polypeptides of the invention can be used to selectively block the action of the polypeptides of the invention. Antibodies against a polypeptide of the invention may be employed to treat infections, particularly bacterial infections and diseases. For example, the present invention contemplates a method for treating a subject suffering from a disease or disorder arising from a pathogenic species, comprising administering to an animal having the pathogen related condition a therapeutically effective amount of a purified antibody that binds specifically to a polypeptide of the invention from such pathogenic species. In another example, the present invention contemplates a method for inhibiting growth or infectivity of a pathogenic species, comprising contacting such species with a purified antibody that binds specifically to a polypeptide of the invention from such species.

[0890] In one embodiment, antibodies reactive with a polypeptide of the invention are used in the immunological screening of cDNA libraries constructed in expression vectors, such as λgt11, λgt18-23, λZAP, and λORF8. Messenger libraries of this type, having coding sequences inserted in the correct reading frame and orientation, can produce fusion proteins. For instance, λgt11 will produce fusion proteins whose amino termini consist of β-galactosidase amino acid sequences and whose carboxy termini consist of a foreign polypeptide. Antigenic epitopes of a polypeptide of the invention can then be detected with antibodies, as, for example, reacting nitrocellulose filters lifted from phage infected bacterial plates with an antibody specific for a polypeptide of the invention. Phage scored by this assay can then be isolated from the infected plate. Thus, homologs of a polypeptide of the invention can be detected and cloned from other sources.

[0891] Antibodies may be employed to isolate or to identify clones expressing the polypeptides to purify the polypeptides by affinity chromatography.

[0892] In other embodiments, the polypeptides of the invention may be modified so as to increase their immunogenicity. For example, a polypeptide, such as an antigenically or immunologically equivalent derivative, may be associated, for example by conjugation, with an immunogenic carrier protein for example bovine serum albumin (BSA) or keyhole limpet haemocyanin (KLH). Alternatively a multiple antigenic peptide comprising multiple copies of the protein or polypeptide, or an antigenically or immunologically equivalent polypeptide thereof may be sufficiently antigenic to improve immunogenicity so as to obviate the use of a carrier.

[0893] In other embodiments, the antibodies of the invention, or variants thereof, are modified to make them less immunogenic when administered to a subject. For example, if the subject is human, the antibody may be “humanized”; where the complimentarity determining region(s) of the hybridoma-derived antibody has been transplanted into a human monoclonal antibody, for example as described in Jones, P. et al. (1986), Nature 321, 522-525 or Tempest et al. (1991) Biotechnology 9, 266-273. Also, transgenic mice, or other mammals, may be used to express humanized antibodies. Such humanization may be partial or complete.

[0894] The use of a nucleic acid of the invention in genetic immunization may employ a suitable delivery method such as direct injection of plasmid DNA into muscles (Wolff et al., Hum Mol Genet 1992, 1:363, Manthorpe et al., Hum. Gene Ther. 1963:4, 419), delivery of DNA complexed with specific protein carriers (Wu et al., J Biol Chem. 1989: 264,16985), coprecipitation of DNA with calcium phosphate (Benvenisty & Reshef, PNAS USA, 1986:83,9551), encapsulation of DNA in various forms of liposomes (Kaneda et al., Science 1989:243,375), particle bombardment (Tang et al., Nature 1992, 356:152, Eisenbraun et al., DNA Cell Biol 1993, 12:791) and in vivo infection using cloned retroviral vectors (Seeger et al., PNAS USA 1984:81,5849).

### 8. Diagnostic Assays

[0895] The invention further provides a method for detecting the presence of a pathogenic species in a biological sample. Detection of a pathogenic species in a subject, particularly a mammal, and especially a human, will provide a diagnostic method for diagnosis of a disease or disorder related to such species. In general, the method involves contacting the biological sample with a compound or an agent capable of detecting a polypeptide of the invention or a nucleic acid of the invention. The term “biological sample” when used in reference to a diagnostic assay is intended to include tissues, cells and biological fluids isolated from a subject, as well as tissues, cells and fluids present within a subject.

[0896] The detection method of the invention may be used to detect the presence of a pathogenic species in a biological sample in vitro as well as in vivo. For example, in vitro techniques for detection of a nucleic acid of the invention include Northern hybridizations and in situ hybridizations. In vitro techniques for detection of polypeptides of the invention include enzyme linked immunosorbent assays (ELISAs), Western blots, immunoprecipitations, immunofluorescence, radioimmunoassays and competitive binding assays. Alternatively, polypeptides of the invention can be detected in vivo in a subject by introducing into the subject a labeled antibody specific for a polypeptide of the invention. For example, the antibody can be labeled with a radioactive marker whose presence and location in a subject can be detected by standard imaging techniques. It may be possible to use all of the diagnostic methods disclosed herein for pathogens in addition to the pathogenic speices of origin for any specific polypeptide of the invention.

[0897] Nucleic acids for diagnosis may be obtained from an infected individual's cells and tissues, such as bone, blood, muscle, cartilage, and skin. Nucleic acids, e.g., DNA and RNA, may be used directly for detection or may be amplified, e.g., enzymatically by using PCR or other amplification technique, prior to analysis. Using amplification, characterization of the species and strain of prokaryote present in an individual, may be made by an analysis of the genotype of the prokaryote gene. Deletions and insertions can be detected by a change in size of the amplified product in comparison to the genotype of a reference sequence. Point mutations can be identified by hybridizing a nucleic acid, e.g., amplified DNA, to a nucleic acid of the invention, which nucleic acid may be labeled. Perfectly matched sequences can be distinguished from mismatched duplexes by RNase digestion or by differences in melting temperatures. DNA sequence differences may also be detected by alterations in the electrophoretic mobility of the DNA fragments in gels, with or without denaturing agents, or by direct DNA sequencing. See, e.g. Myers et al., Science, 230: 1242 (1985). Sequence changes at specific locations also may be revealed by nuclease protection assays, such as RNase and S1 protection or a chemical cleavage method. See, e.g., Cotton et al., Proc. Natl. Acad. Sci., USA, 85: 4397-4401 (1985).

[0898] Agents for detecting a nucleic acid of the invention, e.g., comprising the sequence set forth in a subject nucleic acid sequence, include labeled or labelable nucleic acid probes capable of hybridizing to a nucleic acid of the invention. The nucleic acid probe can comprise, for example, the full length sequence of a nucleic acid of the invention, or an equivalent thereof, or a portion thereof, such as an oligonucleotide of at least 15, 30, 50, 100, 250 or 500 nucleotides in length and sufficient to specifically hybridize under stringent conditions to a subject nucleic acid sequence, or the complement thereof. Agents for detecting a polypeptide of the invention, e.g., comprising an amino acid sequence of a subject amino acid sequence, include labeled or labelable antibodies capable of binding to a polypeptide of the invention. Antibodies may be polyclonal, or alternatively, monoclonal. An intact antibody, or a fragment thereof (e.g., Fab or F(ab′)₂) can be used. Labeling the probe or antibody also encompasses direct labeling of the probe or antibody by coupling (e.g., physically linking) a detectable substance to the probe or antibody, as well as indirect labeling of the probe or antibody by reactivity with another reagent that is directly labeled. Examples of indirect labeling include detection of a primary antibody using a fluorescently labeled secondary antibody and end-labeling of a DNA probe with biotin such that it can be detected with fluorescently labeled streptavidin.

[0899] In certain embodiments, detection of a nucleic acid of the invention in a biological sample involves the use of a probe/primer in a polymerase chain reaction (PCR) (see, e.g. U.S. Pat. Nos. 4,683,195 and 4,683,202), such as anchor PCR or RACE PCR, or, alternatively, in a ligation chain reaction (LCR) (see, e.g., Landegran et al. (1988) Science 241:1077-1080; and Nakazawa et al. (1994) PNAS 91:360-364), the latter of which can be particularly useful for distinguishing between orthologs of polynucleotides of the invention (see Abravaya et al. (1995) Nucleic Acids Res. 23:675-682). This method can include the steps of collecting a sample of cells from a patient, isolating nucleic acid (e.g., genomic, mRNA or both) from the cells of the sample, contacting the nucleic acid sample with one or more primers which specifically hybridize to a nucleic acid of the invention under conditions such that hybridization and amplification of the polynucleotide (if present) occurs, and detecting the presence or absence of an amplification product, or detecting the size of the amplification product and comparing the length to a control sample.

[0900] In one aspect, the present invention contemplates a method for detecting the presence of a pathogenic species in a sample, the method comprising: (a) providing a sample to be tested for the presence of such pathogenic species; (b) contacting the sample with an antibody reactive against eight consecutive amino acid residues of a subject amino acid sequence from such species under conditions which permit association between the antibody and its ligand; and (c) detecting interaction of the antibody with its ligand, thereby detecting the presence of such species in the sample.

[0901] In another aspect, the present invention contemplates a method for detecting the presence of a pathogenic species in a sample, the method comprising: (a) providing a sample to be tested for the presence of such pathogenic speices; (b) contacting the sample with an antibody that binds specifically to a polypeptide of the invention from such species under conditions which permit association between the antibody and its ligand; and (c) detecting interaction of the antibody with its ligand, thereby detecting the presence of such species in the sample.

[0902] In yet another example, the present invention contemplates a method for diagnosing a patient suffering from a disease or disorder of a pathogenic species, comprising: (a) obtaining a biological sample from a patient; (b) detecting the presence or absence of a polypeptide of the invention, or a nucleic acid encoding a polypeptide of the invention, in the sample; and (c) diagnosing a patient suffering from such a disease or disorder based on the presence of a polypeptide of the invention, or a nucleic acid encoding a polypeptide of the invention, in the patient sample.

[0903] The diagnostic assays of the invention may also be used to monitor the effectiveness of a anti-pathogenic treatment in an individual suffering from a disease or disorder of such pathogen. For example, the presence and/or amount of a nucleic acid of the invention or a polypeptide of the invention can be detected in an individual suffering from a disease or disorder related to a pathogen before and after treatment with an anti-pathogen therapeutic agent. Any change in the level of a polynucleotide or polypeptide of the invention after treatment of the individual with the therapeutic agent can provide information about the effectiveness of the treatment course. In particular, no change, or a decrease, in the level of a polynucleotide or polypeptide of the invention present in the biological sample will indicate that the therapeutic is successfully combating such disease or disorder.

[0904] The invention also encompasses kits for detecting the presence of a pathogen in a biological sample. For example, the kit can comprise a labeled or labelable compound or agent capable of detecting a polynucleotide or polypeptide of the invention in a biological sample; means for determining the amount of a pathogen in the sample; and means for comparing the amount of a pathogen in the sample with a standard. The compound or agent can be packaged in a suitable container. The kit can further comprise instructions for using the kit to detect a polynucleotide or polypeptide of the invention.

### 9. Drug Discovery

[0905] Modulators to polypeptides of the invention and other structurally related molecules, and complexes containing the same, may be identified and developed as set forth below and otherwise using techniques and methods known to those of skill in the art. The modulators of the invention may be employed, for instance, to inhibit and treat diseases or conditions associated with the pathogne of origin for any such polypeptide of the invention.

[0906] A variety of methods for inhibiting the growth or infectivity of pathogens are contemplated by the present invention. For example, exemplary methods involve contacting a pathogen with a polypeptide of the invention which modulates the same or another polypeptide from such pathogen, a nucleic acid encoding such polypeptide of the invention, or a compound thought or shown to be effective against such pathogen.

[0907] For example, in one aspect, the present invention contemplates a method for treating a patient suffering from an infection of a pathognic species, comprising administering to the patient an inhibitor of a subject amino acid sequence from such species in an amount effective to inhibit the expression and/or activity of a polypeptide of the invention. In certain instances, the animal is a human or a livestock animal such as a cow, pig, goat or sheep. The present invention further contemplates a method for treating a subject suffering from a disease or disorder of a pathogen, comprising administering to an animal having the condition a therapeutically effective amount of a molecule identified using one of the methods of the present invention.

[0908] The present invention contemplates making any molecule that is shown to modulate the activity of a polypeptide of the invention.

[0909] In another embodiment, inhibitors, modulators of the subject polypeptides, or biological complexes containing them, may be used in the manufacture of a medicament for any number of uses, including, for example, treating any disease or other treatable condition of a patient (including humans and animals).

[0910] (a) Drug Design

[0911] A number of techniques can be used to screen, identify, select and design chemical entities capable of associating with polypeptides of the invention, structurally homologous molecules, and other molecules. Knowledge of the structure for a polypeptide of the invention, determined in accordance with the methods described herein, permits the design and/or identification of molecules and/or other modulators which have a shape complementary to the conformation of a polypeptide of the invention, or more particularly, a druggable region thereof. It is understood that such techniques and methods may use, in addition to the exact structural coordinates and other information for a polypeptide of the invention, structural equivalents thereof described above (including, for example, those structural coordinates that are derived from the structural coordinates of amino acids contained in a druggable region as described above).

[0912] The term “chemical entity,” as used herein, refers to chemical compounds, complexes of two or more chemical compounds, and fragments of such compounds or complexes. In certain instances, it is desirable to use chemical entities exhibiting a wide range of structural and functional diversity, such as compounds exhibiting different shapes (e.g., flat aromatic rings(s), puckered aliphatic rings(s), straight and branched chain aliphatics with single, double, or triple bonds) and diverse functional groups (e.g., carboxylic acids, esters, ethers, amines, aldehydes, ketones, and various heterocyclic rings).

[0913] In one aspect, the method of drug design generally includes computationally evaluating the potential of a selected chemical entity to associate with any of the molecules or complexes of the present invention (or portions thereof). For example, this method may include the steps of (a) employing computational means to perform a fitting operation between the selected chemical entity and a druggable region of the molecule or complex; and (b) analyzing the results of said fitting operation to quantify the association between the chemical entity and the druggable region.

[0914] A chemical entity may be examined either through visual inspection or through the use of computer modeling using a docking program such as GRAM, DOCK, or AUTODOCK (Dunbrack et al., Folding & Design, 2:27-42 (1997)). This procedure can include computer fitting of chemical entities to a target to ascertain how well the shape and the chemical structure of each chemical entity will complement or interfere with the structure of the subject polypeptide (Bugg et al., Scientific American, Dec.: 92-98 (1993); West et al., TIPS, 16:67-74 (1995)). Computer programs may also be employed to estimate the attraction, repulsion, and steric hindrance of the chemical entity to a druggable region, for example. Generally, the tighter the fit (e.g., the lower the steric hindrance, and/or the greater the attractive force) the more potent the chemical entity will be because these properties are consistent with a tighter binding constant. Furthermore, the more specificity in the design of a chemical entity the more likely that the chemical entity will not interfere with related proteins, which may minimize potential side-effects due to unwanted interactions.

[0915] A variety of computational methods for molecular design, in which the steric and electronic properties of druggable regions are used to guide the design of chemical entities, are known: Cohen et al. (1990) J. Med. Cam. 33: 883-894; Kuntz et al. (1982) J. Mol. Biol 161: 269-288; DesJarlais (1988) J. Med. Cam. 31: 722-729; Bartlett et al. (1989) Spec. Publ., Roy. Soc. Chem. 78: 182-196; Goodford et al. (1985) J. Med. Cam. 28: 849-857; and DesJarlais et al. J. Med. Cam. 29:. 2149-2153. Directed methods generally fall into two categories: (1) design by analogy in which 3-D structures of known chemical entities (such as from a crystallographic database) are docked to the druggable region and scored for goodness-of-fit; and (2) de novo design, in which the chemical entity is constructed piece-wise in the druggable region. The chemical entity may be screened as part of a library or a database of molecules. Databases which may be used include ACD (Molecular Designs Limited), NCI (National Cancer Institute), CCDC (Cambridge Crystallographic Data Center), CAST (Chemical Abstract Service), Derwent (Derwent Information Limited), Maybridge (Maybridge Chemical Company Ltd), Aldrich (Aldrich Chemical Company), DOCK (University of California in San Francisco), and the Directory of Natural Products (Chapman & Hall). Computer programs such as CONCORD (Tripos Associates) or DB-Converter (Molecular Simulations Limited) can be used to convert a data set represented in two dimensions to one represented in three dimensions.

[0916] Chemical entities may be tested for their capacity to fit spatially with a druggable region or other portion of a target protein. As used herein, the term “fits spatially” means that the three-dimensional structure of the chemical entity is accommodated geometrically by a druggable region. A favorable geometric fit occurs when the surface area of the chemical entity is in close proximity with the surface area of the druggable region without forming unfavorable interactions. A favorable complementary interaction occurs where the chemical entity interacts by hydrophobic, aromatic, ionic, dipolar, or hydrogen donating and accepting forces. Unfavorable interactions may be steric hindrance between atoms in the chemical entity and atoms in the druggable region.

[0917] If a model of the present invention is a computer model, the chemical entities may be positioned in a druggable region through computational docking. If, on the other hand, the model of the present invention is a structural model, the chemical entities may be positioned in the druggable region by, for example, manual docking. As used herein the term “docking” refers to a process of placing a chemical entity in close proximity with a druggable region, or a process of finding low energy conformations of a chemical entity/druggable region complex.

[0918] In an illustrative embodiment, the design of potential modulator begins from the general perspective of shape complimentary for the druggable region of a polypeptide of the invention, and a search algorithm is employed which is capable of scanning a database of small molecules of known three-dimensional structure for chemical entities which fit geometrically with the target druggable region. Most algorithms of this type provide a method for finding a wide assortment of chemical entities that are complementary to the shape of a druggable region of the subject polypeptide. Each of a set of chemical entities from a particular data-base, such as the Cambridge Crystallographic Data Bank (CCDB) (Allen et al. (1973) J. Chem. Doc. 13: 119), is individually docked to the druggable region of a polypeptide of the invention in a number of geometrically permissible orientations with use of a docking algorithm. In certain embodiments, a set of computer algorithms called DOCK, can be used to characterize the shape of invaginations and grooves that form the active sites and recognition surfaces of the druggable region (Kuntz et al. (1982) J. Mol. Biol 161: 269-288). The program can also search a database of small molecules for templates whose shapes are complementary to particular binding sites of a polypeptide of the invention (DesJarlais et al. (1988) J Med Chem 31: 722-729).

[0919] The orientations are evaluated for goodness-of-fit and the best are kept for further examination using molecular mechanics programs, such as AMBER or CHARMM. Such algorithms have previously proven successful in finding a variety of chemical entities that are complementary in shape to a druggable region.

[0920] Goodford (1985, J Med Chem 28:849-857) and Boobbyer et al. (1989, J Med Chem 32:1083-1094) have produced a computer program (GRID) which seeks to determine regions of high affinity for different chemical groups (termed probes) of the druggable region. GRID hence provides a tool for suggesting modifications to known chemical entities that might enhance binding. It may be anticipated that some of the sites discerned by GRID as regions of high affinity correspond to “pharmacophoric patterns” determined inferentially from a series of known ligands. As used herein, a “pharmacophoric pattern” is a geometric arrangement of features of chemical entities that is believed to be important for binding. Attempts have been made to use pharmacophoric patterns as a search screen for novel ligands (Jakes et al. (1987) J Mol Graph 5:4148; Brint et al. (1987) J Mol Graph 5:49-56; Jakes et al. (1986) J Mol Graph 4:12-20).

[0921] Yet a further embodiment of the present invention utilizes a computer algorithm such as CLIX which searches such databases as CCDB for chemical entities which can be oriented with the druggable region in a way that is both sterically acceptable and has a high likelihood of achieving favorable chemical interactions between the chemical entity and the surrounding amino acid residues. The method is based on characterizing the region in terms of an ensemble of favorable binding positions for different chemical groups and then searching for orientations of the chemical entities that cause maximum spatial coincidence of individual candidate chemical groups with members of the ensemble. The algorithmic details of CLIX is described in Lawrence et al. (1992) Proteins 12:31-41.

[0922] In this way, the efficiency with which a chemical entity may bind to or interfere with a druggable region may be tested and optimized by computational evaluation. For example, for a favorable association with a druggable region, a chemical entity must preferably demonstrate a relatively small difference in energy between its bound and fine states (i.e., a small deformation energy of binding). Thus, certain, more desirable chemical entities will be designed with a deformation energy of binding of not greater than about 10 kcal/mole, and more preferably, not greater than 7 kcal/mole. Chemical entities may interact with a druggable region in more than one conformation that is similar in overall binding energy. In those cases, the deformation energy of binding is taken to be the difference between the energy of the free entity and the average energy of the conformations observed when the chemical entity binds to the target.

[0923] In this way, the present invention provides computer-assisted methods for identifying or designing a potential modulator of the activity of a polypeptide of the invention including: supplying a computer modeling application with a set of structure coordinates of a molecule or complex, the molecule or complex including at least a portion of a druggable region from a polypeptide of the invention; supplying the computer modeling application with a set of structure coordinates of a chemical entity; and determining whether the chemical entity is expected to bind to the molecule or complex, wherein binding to the molecule or complex is indicative of potential modulation of the activity of a polypeptide of the invention.

[0924] In another aspect, the present invention provides a computer-assisted method for identifying or designing a potential modulator to a polypeptide of the invention, supplying a computer modeling application with a set of structure coordinates of a molecule or complex, the molecule or complex including at least a portion of a druggable region of a polypeptide of the invention; supplying the computer modeling application with a set of structure coordinates for a chemical entity; evaluating the potential binding interactions between the chemical entity and active site of the molecule or molecular complex; structurally modifying the chemical entity to yield a set of structure coordinates for a modified chemical entity, and determining whether the modified chemical entity is expected to bind to the molecule or complex, wherein binding to the molecule or complex is indicative of potential modulation of the polypeptide of the invention.

[0925] In one embodiment, a potential modulator can be obtained by screening a peptide library (Scott and Smith, Science, 249:386-390 (1990); Cwirla et al., Proc. Natl. Acad. Sci., 87:6378-6382 (1990); Devlin et al., Science, 249:404-406 (1990)). A potential modulator selected in this manner could then be systematically modified by computer modeling programs until one or more promising potential drugs are identified. Such analysis has been shown to be effective in the development of HIV protease inhibitors (Lam et al., Science 263:380-384 (1994); Wlodawer et al., Ann. Rev. Biochem. 62:543-585 (1993); Appelt, Perspectives in Drug Discovery and Design 1:23-48 (1993); Erickson, Perspectives in Drug Discovery and Design 1:109-128 (1993)). Alternatively a potential modulator may be selected from a library of chemicals such as those that can be licensed from third parties, such as chemical and pharmaceutical companies. A third alternative is to synthesize the potential modulator de novo.

[0926] For example, in certain embodiments, the present invention provides a method for making a potential modulator for a polypeptide of the invention, the method including synthesizing a chemical entity or a molecule containing the chemical entity to yield a potential modulator of a polypeptide of the invention, the chemical entity having been identified during a computer-assisted process including supplying a computer modeling application with a set of structure coordinates of a molecule or complex, the molecule or complex including at least one druggable region from a polypeptide of the invention; supplying the computer modeling application with a set of structure coordinates of a chemical entity; and determining whether the chemical entity is expected to bind to the molecule or complex at the active site, wherein binding to the molecule or complex is indicative of potential modulation. This method may further include the steps of evaluating the potential binding interactions between the chemical entity and the active site of the molecule or molecular complex and structurally modifying the chemical entity to yield a set of structure coordinates for a modified chemical entity, which steps may be repeated one or more times.

[0927] Once a potential modulator is identified, it can then be tested in any standard assay for the macromolecule depending of course on the macromolecule, including in high throughput assays. Further refinements to the structure of the modulator will generally be necessary and can be made by the successive iterations of any and/or all of the steps provided by the particular screening assay, in particular further structural analysis by e.g., ¹⁵N NMR relaxation rate determinations or x-ray crystallography with the modulator bound to the subject polypeptide. These studies may be performed in conjunction with biochemical assays.

[0928] Once identified, a potential modulator may be used as a model structure, and analogs to the compound can be obtained. The analogs are then screened for their ability to bind the subject polypeptide. An analog of the potential modulator might be chosen as a modulator when it binds to the subject polypeptide with a higher binding affinity than the predecessor modulator.

[0929] In a related approach, iterative drug design is used to identify modulators of a target protein. Iterative drug design is a method for optimizing associations between a protein and a modulator by determining and evaluating the three dimensional structures of successive sets of protein/modulator complexes. In iterative drug design, crystals of a series of protein/modulator complexes are obtained and then the three-dimensional structures of each complex is solved. Such an approach provides insight into the association between the proteins and modulators of each complex. For example, this approach may be accomplished by selecting modulators with inhibitory activity, obtaining crystals of this new protein/modulator complex, solving the three dimensional structure of the complex, and comparing the associations between the new protein/modulator complex and previously solved protein/modulator complexes. By observing how changes in the modulator affected the protein/modulator associations, these associations may be optimized.

[0930] In addition to designing and/or identifying a chemical entity to associate with a druggable region, as described above, the same techniques and methods may be used to design and/or identify chemical entities that either associate, or do not associate, with affinity regions, selectivity regions or undesired regions of protein targets. By such methods, selectivity for one or a few targets, or alternatively for multiple targets, from the same species or from multiple species, can be achieved.

[0931] For example, a chemical entity may be designed and/or identified for which the binding energy for one druggable region, e.g., an affinity region or selectivity region, is more favorable than that for another region, e.g., an undesired region, by about 20%, 30%, 50% to about 60% or more. It may be the case that the difference is observed between (a) more than two regions, (b) between different regions (selectivity, affinity or undesirable) from the same target, (c) between regions of different targets, (d) between regions of homologs from different species, or (e) between other combinations. Alternatively, the comparison may be made by reference to the Kd, usually the apparent Kd, of said chemical entity with the two or more regions in question.

[0932] In another aspect, prospective modulators are screened for binding to two nearby druggable regions on a target protein. For example, a modulator that binds a first region of a target polypeptide does not bind a second nearby region. Binding to the second region can be determined by monitoring changes in a different set of amide chemical shifts in either the original screen or a second screen conducted in the presence of a modulator (or potential modulator) for the first region. From an analysis of the chemical shift changes, the approximate location of a potential modulator for the second region is identified. Optimization of the second modulator for binding to the region is then carried out by screening structurally related compounds (e.g., analogs as described above); When modulators for the first region and the second region are identified, their location and orientation in the ternary complex can be determined experimentally. On the basis of this structural information, a linked compound, e.g., a consolidated modulator, is synthesized in which the modulator for the first region and the modulator for the second region are linked. In certain embodiments, the two modulators are covalently linked to form a consolidated modulator. This consolidated modulator may be tested to determine if it has a higher binding affinity for the target than either of the two individual modulators. A consolidated modulator is selected as a modulator when it has a higher binding affinity for the target than either of the two modulators. Larger consolidated modulators can be constructed in an analogous manner, e.g., linking three modulators which bind to three nearby regions on the target to form a multilinked consolidated modulator that has an even higher affinity for the target than the linked modulator. In this example, it is assumed that is desirable to have the modulator bind to all the druggable regions. However, it may be the case that binding to certain of the druggable regions is not desirable, so that the same techniques may be used to identify modulators and consolidated modulators that show increased specificity based on binding to at least one but not all druggable regions of a target.

[0933] The present invention provides a number of methods that use drug design as described above. For example, in one aspect, the present invention contemplates a method for designing a candidate compound for screening for inhibitors of a polypeptide of the invention, the method comprising: (a) determining the three dimensional structure of a crystallized polypeptide of the invention or a fragment thereof; and (b) designing a candidate inhibitor based on the three dimensional structure of the crystallized polypeptide or fragment.

[0934] In another aspect, the present invention contemplates a method for identifying a potential inhibitor of a polypeptide of the invention, the method comprising: (a) providing the three-dimensional coordinates of a polypeptide of the invention or a fragment thereof; (b) identifying a druggable region of the polypeptide or fragment; and (c) selecting from a database at least one compound that comprises three dimensional coordinates which indicate that the compound may bind the druggable region; (d) wherein the selected compound is a potential inhibitor of a polypeptide of the invention.

[0935] In another aspect, the present invention contemplates a method for identifying a potential modulator of a molecule comprising a druggable region similar to that of a subject amino acid sequence, the method comprising: (a) using the atomic coordinates of amino acid residues from a subject amino acid sequence, or a fragment thereof, ± a root mean square deviation from the backbone atoms of the amino acids of not more than 1.5 Å, to generate a three-dimensional structure of a molecule comprising a subject amino acid sequence-like druggable region; (b) employing the three dimensional structure to design or select the potential modulator; (c) synthesizing the modulator; and (d) contacting the modulator with the molecule to determine the ability of the modulator to interact with the molecule.

[0936] In another aspect, the present invention contemplates an apparatus for determining whether a compound is a potential inhibitor of a polypeptide having a subject amino acid sequence, the apparatus comprising: (a) a memory that comprises: (i) the three dimensional coordinates and identities of the atoms of a polypeptide of the invention or a fragment thereof that form a druggable site; and (ii) executable instructions; and (b) a processor that is capable of executing instructions to: (i) receive three-dimensional structural information for a candidate compound; (ii) determine if the three-dimensional structure of the candidate compound is complementary to the structure of the interior of the druggable site; and (iii) output the results of the determination.

[0937] In another aspect, the present invention contemplates a method for designing a potential compound for the prevention or treatment of a pathogenic disease or disorder, the method comprising: (a) providing the three dimensional structure of a crystallized polypeptide of the invention, or a fragment thereof; (b) synthesizing a potential compound for the prevention or treatment of such disease or disorder based on the three dimensional structure of the crystallized polypeptide or fragment; (c) contacting a polypeptide of the invention or such pathogenic species with the potential compound; and (d) assaying the activity of a polypeptide of the invention, wherein a change in the activity of the polypeptide indicates that the compound may be useful for prevention or treatment of such disease or disorder.

[0938] In another aspect, the present invention contemplates a method for designing a potential compound for the prevention or treatment of a pathogenic disease or disorder, the method comprising: (a) providing structural information of a druggable region derived from NMR spectroscopy of a polypeptide of the invention, or a fragment thereof; (b) synthesizing a potential compound for the prevention or treatment of such disease or disorder based on the structural information; (c) contacting a polypeptide of the invention or such species with the potential compound; and (d) assaying the activity of a polypeptide of the invention, wherein a change in the activity of the polypeptide indicates that the compound may be useful for prevention or treatment of such disease or disorder.

[0939] (b) In Vitro Assays

[0940] Polypeptides of the invention may be used to assess the activity of small molecules and other modulators in in vitro assays. In one embodiment of such an assay, agents are identified which modulate the biological activity of a protein, protein-protein interaction of interest or protein complex, such as an enzymatic activity, binding to other cellular components, cellular compartmentalization, signal transduction, and the like. In certain embodiments, the test agent is a small organic molecule.

[0941] Assays may employ kinetic or thermodynamic methodology using a wide variety of techniques including, but not limited to, microcalorimetry, circular dichroism, capillary zone electrophoresis, nuclear magnetic resonance spectroscopy, fluorescence spectroscopy, and combinations thereof.

[0942] The invention also provides a method of screening compounds to identify those which modulate the action of polypeptides of the invention, or polynucleotides encoding the same. The method of screening may involve high-throughput techniques. For example, to screen for modulators, a synthetic reaction mix, a cellular compartment, such as a membrane, cell envelope or cell wall, or a preparation of any thereof, comprising a polypeptide of the invention and a labeled substrate or ligand of such polypeptide is incubated in the absence or the presence of a candidate molecule that may be a modulator of a polypeptide of the invention. The ability of the candidate molecule to modulate a polypeptide of the invention is reflected in decreased binding of the labeled ligand or decreased production of product from such substrate. Detection of the rate or level of production of product from substrate may be enhanced by using a reporter system. Reporter systems that may be useful in this regard include but are not limited to colorimetric labeled substrate converted into product, a reporter gene that is responsive to changes in a nucleic acid of the invention or polypeptide activity, and binding assays known in the art.

[0943] Another example of an assay for a modulator of a polypeptide of the invention is a competitive assay that combines a polypeptide of the invention and a potential modulator with molecules that bind to a polypeptide of the invention, recombinant molecules that bind to a polypeptide of the invention, natural substrates or ligands, or substrate or ligand mimetics, under appropriate conditions for a competitive inhibition assay. Polypeptides of the invention can be labeled, such as by radioactivity or a colorimetric compound, such that the number of molecules of a polypeptide of the invention bound to a binding molecule or converted to product can be determined accurately to assess the effectiveness of the potential modulator.

[0944] A number of methods for identifying a molecule which modulates the activity of a polypeptide are known in the art. For example, in one such method, a subject polypeptide is contacted with a test compound, and the activity of the subject polypeptide in the presence of the test compound is determined, wherein a change in the activity of the subject polypeptide is indicative that the test compound modulates the activity of the subject polypeptide. In certain instances, the test compound agonizes the activity of the subject polypeptide, and in other instances, the test compound antagonizes the activity of the subject polypeptide.

[0945] In another example, a compound which modulates the growth or infectivity of a pathogen may be identified by (a) contacting a polypeptide of the invention from such pathogen with a test compound; and (b) determining the activity of the polypeptide in the presence of the test compound, wherein a change in the activity of the polypeptide is indicative that the test compound may modulate the growth or infectivity of such pathogen.

[0946] (c) In Vivo Assays

[0947] Animal models of bacterial infection and/or disease may be used as an in vivo assay for evaluating the effectiveness of a potential drug target in treating or preventing diseases or disorders. A number of suitable animal models are described briefly below, however, these models are only examples and modifications, or completely different animal models, may be used in accord with the methods of the invention.

[0948] (i) Mouse Soft Tissue Model

[0949] The mouse soft tissue infection model is a sensitive and effective method for measurement of bacterial proliferation. In these models (Vogelman et al., 1988, J. Infect. Dis. 157: 287-298) anesthetized mice are infected with the bacteria in the muscle of the hind thigh. The mice can be either chemically immune compromised (e.g., cytoxan treated at 125 mg/kg on days -4, -2, and 0) or immunocompetent. The dose of microbe necessary to cause an infection is variable and depends on the individual microbe, but commonly is on the order of 10⁵-10⁶ colony forming units per injection for bacteria. A variety of mouse strains are useful in this model although Swiss Webster and DBA2 lines are most commonly used. Once infected the animals are conscious and show no overt ill effects of the infections for approximately 12 hours. After that time virulent strains cause swelling of the thigh muscle, and the animals can become bacteremic within approximately 24 hours. This model most effectively measures proliferation of the microbe, and this proliferation is measured by sacrifice of the infected animal and counting colonies from homogenized thighs.

[0950] (ii) Diffusion Chamber Model

[0951] A second model useful for assessing the virulence of microbes is the diffusion chamber model (Malouin et al., 1990, Infect. Immun. 58: 1247-1253; Doy et al., 1980, J. Infect. Dis. 2: 39-51; Kelly et al., 1989, Infect. Immun. 57: 344-350. In this model rodents have a diffusion chamber surgically placed in the peritoneal cavity. The chamber consists of a polypropylene cylinder with semipermeable membranes covering the chamber ends. Diffusion of peritoneal fluid into and out of the chamber provides nutrients for the microbes. The progression of the “infection” may be followed by examining growth, the exoproduct production or RNA messages. The time experiments are done by sampling multiple chambers.

[0952] (iii) Endocarditis Model

[0953] For bacteria, an important animal model effective in assessing pathogenicity and virulence is the endocarditis model (J. Santoro and M. E. Levinson, 1978, Infect. Immun. 19: 915-918). A rat endocarditis model can be used to assess colonization, virulence and proliferation.

[0954] (iv) Osteomyelitis Model

[0955] A fourth model useful in the evaluation of pathogenesis is the osteomyelitis model (Spagnolo et al., 1993, Infect. Immun. 61: 5225-5230). Rabbits are used for these experiments. Anesthetized animals have a small segment of the tibia removed and microorganisms are microinjected into the wound. The excised bone segment is replaced and the progression of the disease is monitored. Clinical signs, particularly inflammation and swelling are monitored. Termination of the experiment allows histolic and pathologic examination of the infection site to complement the assessment procedure.

[0956] (v) Murine Septic Arthritis Model

[0957] A fifth model relevant to the study of microbial pathogenesis is a murine septic arthritis model (Abdelnour et al., 1993, Infect. Immun. 61: 3879-3885). In this model mice are infected intravenously and pathogenic organisms are found to cause inflammation in distal limb joints. Monitoring of the inflammation and comparison of inflammation vs. inocula allows assessment of the virulence of related strains.

[0958] (vi) Bacterial Peritonitis Model

[0959] Finally, bacterial peritonitis offers rapid and predictive data on the virulence of strains (M. G. Bergeron, 1978, Scand. J. Infect. Dis. Suppl. 14: 189-206; S. D. Davis, 1975, Antimicrob. Agents Chemother. 8: 50-53). Peritonitis in rodents, such as mice, can provide essential data on the importance of targets. The end point may be lethality or clinical signs can be monitored. Variation in infection dose in comparison to outcome allows evaluation of the virulence of individual strains.

[0960] A variety of other in vivo models are available and may be used when appropriate for specific pathogens or specific test agents. For example, target organ recovery assays (Gordee et al., 1984, J. Antibiotics 37:1054-1065; Bannatyne et al., 1992, Infect. 20:168-170) may be useful for fungi and for bacterial pathogens which are not acutely virulent to animals.

[0961] It is also relevant to note that the species of animal used for an infection model, and the specific genetic make-up of that animal, may contribute to the effective evaluation of the effects of a particular test agent. For example, immuno-incompetent animals may, in some instances, be preferable to immuno-competent animals. For example, the action of a competent immune system may, to some degree, mask the effects of the test agent as compared to a similar infection in an immuno-incompetent animal. In addition, many opportunistic infections, in fact, occur in immuno-compromised patients, so modeling an infection in a similar immunological environment is appropriate.

### 10. Vaccines

[0962] There are provided by the invention, products, compositions and methods for raising immunological response against a pathogen, especially those pathogens of origin for the polypeptides of the invention. In one aspect, a polypeptide of the invention or a nucleic acid of the invention, or an antigenic fragment thereof, may be administered to a subject, optionally with a booster, adjuvant, or other composition that stimulates immune responses.

[0963] Another aspect of the invention relates to a method for inducing an immunological response in an individual, particularly a mammal which comprises inoculating the individual with a polypeptide of the invention and/or a nucleic acid of the invention, adequate to produce antibody and/or T cell immune response to protect said individual from infection, particularly bacterial infection. Also provided are methods whereby such immunological response slows bacterial replication. Yet another aspect of the invention relates to a method of inducing immunological response in an individual which comprises delivering to such individual a nucleic acid vector, sequence or ribozyme to direct expression of a polypeptide of the invention and/or a nucleic acid of the invention in vivo in order to induce an immunological response, such as, to produce antibody and/or T cell immune response, including, for example, cytokine-producing T cells or cytotoxic T cells, to protect said individual, preferably a human, from disease, whether that disease is already established within the individual or not. One example of administering the gene is by accelerating it into the desired cells as a coating on particles or otherwise. Such nucleic acid vector may comprise DNA, RNA, a ribozyme, a modified nucleic acid, a DNA/RNA hybrid, a DNA-protein complex or an RNA-protein complex.

[0964] A further aspect of the invention relates to an immunological composition that when introduced into an individual, preferably a human, capable of having induced within it an immunological response, induces an immunological response in such individual to a nucleic acid of the invention and/or a polypeptide encoded therefrom, wherein the composition comprises a recombinant nucleic acid of the invention and/or polypeptide encoded therefrom and/or comprises DNA and/or RNA which encodes and expresses an antigen of said nucleic acid of the invention, polypeptide encoded therefrom, or other polypeptide of the invention. The immunological response may be used therapeutically or prophylactically and may take the form of antibody immunity and/or cellular immunity, such as cellular immunity arising from CTL or CD4+T cells.

[0965] In another embodiment, the invention relates to compositions comprising a polypeptide of the invention and an adjuvant. The adjuvant can be any vehicle which would typically enhance the antigenicity of a polypeptide, e.g., minerals (for instance, alum, aluminum hydroxide or aluminum phosphate), saponins complexed to membrane protein antigens (immune stimulating complexes), pluronic polymers with mineral oil, killed mycobacteria in mineral oil, Freund's complete adjuvant, bacterial products, such as muramyl dipeptide (MDP) and lipopolysaccharide (LPS), as well as lipid A, liposomes, or any of the other adjuvants known in the art. A polypeptide of the invention can be emulsified with, absorbed onto, or coupled with the adjuvant.

[0966] A polypeptide of the invention may be fused with co-protein or chemical moiety which may or may not by itself produce antibodies, but which is capable of stabilizing the first protein and producing a fused or modified protein which will have antigenic and/or immunogenic properties, and preferably protective properties. Thus fused recombinant protein, may further comprise an antigenic co-protein, such as lipoprotein D from Hemophilus influenzae, Glutathione-S-transferase (GST) or beta-galactosidase, or any other relatively large co-protein which solubilizes the protein and facilitates production and purification thereof. Moreover, the co-protein may act as an adjuvant in the sense of providing a generalized stimulation of the immune system of the organism receiving the protein. The co-protein may be attached to either the amino- or carboxy-terminus of a polypeptide of the invention.

[0967] Provided by this invention are compositions, particularly vaccine compositions, and methods comprising the polypeptides and/or polynucleotides of the invention and immunostimulatory DNA sequences, such as those described in Sato, Y. et al. Science 273: 352 (1996).

[0968] Also, provided by this invention are methods using the described polynucleotide or particular fragments thereof, which have been shown to encode non-variable regions of bacterial cell surface proteins, in polynucleotide constructs used in such genetic immunization experiments in animal models of infection with a pathogen of interest. Such experiments will be particularly useful for identifying protein epitopes able to provoke a prophylactic or therapeutic immune response. It is believed that this approach will allow for the subsequent preparation of monoclonal antibodies of particular value, derived from the requisite organ of the animal successfully resisting or clearing infection, for the development of prophylactic agents or therapeutic treatments of bacterial infection in mammals, particularly humans.

[0969] A polypeptide of the invention may be used as an antigen for vaccination of a host to produce specific antibodies which protect against invasion of bacteria, for example by blocking adherence of bacteria to damaged tissue.

### 11. Array Analysis

[0970] In part, the present invention is directed to the use of subject nucleic acids in arrays to assess gene expression. In another part, the present invention is directed to the use of subject nucleic acids in arrays for their pathogen of origin. In yet another part, the present invention contemplates using the subject nucleic acids to interact with probes contained on arrays.

[0971] In one aspect, the present invention contemplates an array comprising a substrate having a plurality of addresses, wherein at least one of the addresses has disposed thereon a capture probe that can specifically bind to a nucleic acid of the invention. In another aspect, the present invention contemplates a method for detecting expression of a nucleotide sequence which encodes a polypeptide of the invention, or a fragment thereof, using the foregoing array by: (a) providing a sample comprising at least one mRNA molecule; (b) exposing the sample to the array under conditions which promote hybridization between the capture probe disposed on the array and a nucleic acid complementary thereto; and (c) detecting hybridization between an mRNA molecule of the sample and the capture probe disposed on the array, thereby detecting expression of a sequence which encodes for a polypeptide of the invention, or a fragment thereof.

[0972] Arrays are often divided into microarrays and macroarrays, where microarrays have a much higher density of individual probe species per area. Microarrays may have as many as 1000 or more different probes in a 1 cm² area. There is no concrete cut-off to demarcate the difference between micro- and macroarrays, and both types of arrays are contemplated for use with the invention.

[0973] Microarrays are known in the art and generally consist of a surface to which probes that correspond in sequence to gene products (e.g., cDNAs, mRNAs, oligonucleotides) are bound at known positions. In one embodiment, the microarray is an array (e.g., a matrix) in which each position represents a discrete binding site for a product encoded by a gene (e.g., a protein or RNA), and in which binding sites are present for products of most or almost all of the genes in the organism's genome. In certain embodiments, the binding site or site is a nucleic acid or nucleic acid analogue to which a particular cognate cDNA can specifically hybridize. The nucleic acid or analogue of the binding site may be, e.g., a synthetic oligomer, a full-length cDNA, a less-than full length cDNA, or a gene fragment.

[0974] Although in certain embodiments the microarray contains binding sites for products of all or almost all genes in the target organism's genome, such comprehensiveness is not necessarily required. Usually the microarray will have binding sites corresponding to at least 100, 500, 1000, 4000 genes or more. In certain embodiments, arrays will have anywhere from about 50, 60, 70, 80, 90, or even more than 95% of the genes of a particular organism represented. The microarray typically has binding sites for genes relevant to testing and confirming a biological network model of interest. Several exemplary human microarrays are publicly available.

[0975] The probes to be affixed to the arrays are typically polynucleotides. These DNAs can be obtained by, e.g., polymerase chain reaction (PCR) amplification of gene segments from genomic DNA, cDNA (e.g., by RT-PCR), or cloned sequences. PCR primers are chosen, based on the known sequence of the genes or cDNA, that result in amplification of unique fragments (e.g., fragments that do not share more than 10 bases of contiguous identical sequence with any other fragment on the microarray). Computer programs are useful in the design of primers with the required specificity and optimal amplification properties. See, e.g., Oligo pl version 5.0 (National Biosciences). In an alternative embodiment, the binding (hybridization) sites are made from plasmid or phage clones of genes, cDNAs (e.g., expressed sequence tags), or inserts therefrom (Nguyen et al., 1995, Genomics 29:207-209).

[0976] A number of methods are known in the art for affixing the nucleic acids or analogues to a solid support that makes up the array (Schena et al., 1995, Science 270:467-470; DeRisi et al., 1996, Nature Genetics 14:457-460; Shalon et al., 1996, Genome Res. 6:639-645; and Schena et al., 1995, Proc. Natl. Acad. Sci. USA 93:10539-11286).

[0977] Another method for making microarrays is by making high-density oligonucleotide arrays (Fodor et al., 1991, Science 251:767-773; Pease et al., 1994, Proc. Natl. Acad. Sci. USA 91:5022-5026; Lockhart et al., 1996, Nature Biotech 14:1675; U.S. Pat. Nos. 5,578,832; 5,556,752; and 5,510,270; Blanchard et al., 1996, 11: 687-90).

[0978] Other methods for making microarrays, e.g., by masking (Maskos and Southern, 1992, Nuc. Acids Res. 20:1679-1684), may also be used. In principal, any type of array, for example, dot blots on a nylon hybridization membrane (see Sambrook et al., Molecular Cloning-A Laboratory Manual (2nd Ed.), Vol. 1-3, Cold Spring Harbor Laboratory, Cold Spring Harbor, N.Y., 1989), could be used, although, as will be recognized by those of skill in the art.

[0979] The nucleic acids to be contacted with the microarray may be prepared in a variety of ways, and may include nucleotides of the subject invention. Such nucleic acids are often labeled fluorescently. Nucleic acid hybridization and wash conditions are chosen so that the population of labeled nucleic acids will specifically hybridize to appropriate, complementary nucleic acids affixed to the matrix. Non-specific binding of the labeled nucleic acids to the array can be decreased by treating the array with a large quantity of non-specific DNA—a so-called “blocking” step.

[0980] When fluorescently labeled probes are used, the fluorescence emissions at each site of a transcript array may be detected by scanning confocal laser microscopy. When two fluorophores are used, a separate scan, using the appropriate excitation line, is carried out for each of the two fluorophores used. Fluorescent microarray scanners are commercially available from Affymetrix, Packard BioChip Technologies, BioRobotics and many other suppliers. Signals are recorded, quantitated and analyzed using a variety of computer software.

[0981] According to the method of the invention, the relative abundance of an mRNA in two cells or cell lines is scored as a perturbation and its magnitude determined (i.e., the abundance is different in the two sources of mRNA tested), or as not perturbed (i.e., the relative abundance is the same). As used herein, a difference between the two sources of RNA of at least a factor of about 25% (RNA from one source is 25% more abundant in one source than the other source), more usually about 50%, even more often by a factor of about 2 (twice as abundant), 3 (three times as abundant) or 5 (five times as abundant) is scored as a perturbation. Present detection methods allow reliable detection of difference of an order of about 2-fold to about 5-fold, but more sensitive methods are expected to be developed.

[0982] In addition to identifying a perturbation as positive or negative, it is advantageous to determine the magnitude of the perturbation. This can be carried out, as noted above, by calculating the ratio of the emission of the two fluorophores used for differential labeling, or by analogous methods that will be readily apparent to those of skill in the art.

[0983] In certain embodiments, the data obtained from such experiments reflects the relative expression of each gene represented in the microarray. Expression levels in different samples and conditions may now be compared using a variety of statistical methods.

### 12. Pharmaceutical Compositions

[0984] Pharmaceutical compositions of this invention include any modulator identified according to the present invention, or a pharmaceutically acceptable salt thereof, and a pharmaceutically acceptable carrier, adjuvant, or vehicle. The term “pharmaceutically acceptable carrier” refers to a carrier(s) that is “acceptable” in the sense of being compatible with the other ingredients of a composition and not deleterious to the recipient thereof.

[0985] Methods of making and using such pharmaceutical compositions are also included in the invention. The pharmaceutical compositions of the invention can be administered orally, parenterally, by inhalation spray, topically, rectally, nasally, buccally, vaginally, or via an implanted reservoir. The term parenteral as used herein includes subcutaneous, intracutaneous, intravenous, intramuscular, intra articular, intrasynovial, intrasternal, intrathecal, intralesional, and intracranial injection or infusion techniques.

[0986] Dosage levels of between about 0.01 and about 100 mg/kg body weight per day, preferably between about 0.5 and about 75 mg/kg body weight per day of the modulators described herein are useful for the prevention and treatment of disease and conditions, including diseases and conditions mediated by pathogenic speices of origin for the polypeptides of the invention. The amount of active ingredient that may be combined with the carrier materials to produce a single dosage form will vary depending upon the host treated and the particular mode of administration. A typical preparation will contain from about 5% to about 95% active compound (w/w). Alternatively, such preparations contain from about 20% to about 80% active compound.

### 13. Antimicrobial Agents

[0987] The polypeptides of the invention may be used to develop antimicrobial agents for use in a wide variety of applications. The uses are as varied as surface disinfectants, topical pharmaceuticals, personal hygiene applications (e.g., antimicrobial soap, deodorant or the like), additives to cell culture medium, and systemic pharmaceutical products. Antimicrobial agents of the invention may be incorporated into a wide variety of products and used to treat an already existing microbial infection/contamination or may be used prophylactically to suppress future infection/contamination.

[0988] The antimicrobial agents of the invention may be administered to a site, or potential site, of infection/contamination in either a liquid or solid form. Alternatively, the agent may be applied as a coating to a surface of an object where microbial growth is undesirable using nonspecific absorption or covalent attachment. For example, implants or devices (such as linens, cloth, plastics, heart pacemakers, surgical stents, catheters, gastric tubes, endotracheal tubes, prosthetic devices) can be coated with the antimicrobials to minimize adherence or persistence of bacteria during storage and use. The antimicrobials may also be incorporated into such devices to provide slow release of the agent locally for several weeks during healing. The antimicrobial agents may also be used in association with devices such as ventilators, water reservoirs, air-conditioning units, filters, paints, or other substances. Antimicrobials of the invention may also be given orally or systemically after transplantation, bone replacement, during dental procedures, or during implantation to prevent colonization with bacteria.

[0989] In another embodiment, antimicrobial agents of the invention may be used as a food preservative or in treating food products to eliminate potential pathogens. The latter use might be targeted to the fish and poultry industries that have serious problems with enteric pathogens which cause severe human disease. In a further embodiment, the agents of the invention may be used as antimicrobials for food crops, either as agents to reduce post harvest spoilage or to enhance host resistance. The antimicrobials may also be used as preservatives in processed foods either alone or in combination with antibacterial food additives such as lysozymes.

[0990] In another embodiment, the antimicrobials of the invention may be used as an additive to culture medium to prevent or eliminate infection of cultured cells with a pathogen.

### 14. Other Embodiments

[0991] In addition to the other embodiments, aspects and objects of the present invention disclosed herein, including the claims appended hereto, the following paragraphs set forth additional, non-limiting embodiments and other aspects of the present invention (with all references to paragraphs contained in this section referring to other paragraphs set forth in this section):
[0992] 1. A composition comprising an isolated, recombinant polypeptide, wherein the polypeptide comprises: (a) a subject amino acid sequence; (b) an amino acid sequence having at least about 95% identity with the subject amino acid sequence; or (c) an amino acid sequence encoded by a polynucleotide that hybridizes under stringent conditions to the complementary strand of a polynucleotide having the subject nucleic acid sequence that corresponds to the subject amino acid sequence; wherein the polypeptide of (a), (b) or (c) has at least one biological activity as described above for the subject amino acid sequence from the indicated pathogen, and wherein the polypeptide of (a), (b) or (c) is at least about 90% pure in a sample of the composition.
[0993] 2. The composition of paragraph 1, wherein the polypeptide is purified to essential homogeneity.
[0994] 3. The composition of paragraph 1, wherein at least about two-thirds of the polypeptide in the sample is soluble.
[0995] 4. The composition of paragraph 1, wherein the polypeptide is fused to at least one heterologous polypeptide.
[0996] 5. The composition of paragraph 4, wherein the heterologous polypeptide increases the solubility or stability of the polypeptide
[0997] 6. A complex comprising a polypeptide of the composition of paragraph 1 and a protein that is shown herein to interact with the polypeptide.
[0998] 7. The composition of paragraph 1, which further comprises a matrix suitable for mass spectrometry.
[0999] 8. The composition of paragraph 7, wherein the matrix is a nicotinic acid derivative or a cinnamic acid derivative.
[1000] 9. A sample comprising an isolated, recombinant polypeptide, wherein the polypeptide comprises: (a) a subject amino acid sequence; (b) an amino acid sequence having at least about 95% identity with the subject amino acid sequence; or (c) an amino acid sequence encoded by a polynucleotide that hybridizes under stringent conditions to the complementary strand of a polynucleotide having the subject nucleic acid sequence that corresponds to the subject amino acid sequence; wherein the polypeptide of (a), (b) or (c) has at least one biological activity as described above for the subject amino acid sequence from the indicated pathogen, and wherein the polypeptide of (a), (b) or (c) is labeled with a heavy atom.
[1001] 10. The sample of paragraph 9, wherein the heavy atom is one of the following: cobalt, selenium, krypton, bromine, strontium, molybdenum, ruthenium, rhodium, palladium, silver, cadmium, tin, iodine, xenon, barium, lanthanum, cerium, praseodymium, neodymium, samarium, europium, gadolinium, terbium, dysprosium, holmium, erbium, thulium, ytterbium, lutetium, tantalum, tungsten, rhenium, osmium, iridium, platinum, gold, mercury, thallium, lead, thorium and uranium.
[1002] 11. The sample of paragraph 9, wherein the polypeptide is labeled with seleno-methionine.
[1003] 12. The sample of paragraph 9, further comprising a cryo-protectant.
[1004] 13. The sample of paragraph 12, wherein the cryo-protectant is one of the following: methyl pentanediol, isopropanol, ethylene glycol, glycerol, formate, citrate, mineral oil and a low-molecular-weight polyethylene glycol.
[1005] 14. A crystallized, recombinant polypeptide comprising: (a) a subject amino acid sequence; (b) an amino acid sequence having at least about 95% identity with the subject amino acid sequence; or (c) an amino acid sequence encoded by a polynucleotide that hybridizes under stringent conditions to the complementary strand of a polynucleotide having the subject nucleic acid sequence that corresponds to the subject amino acid sequence; wherein the polypeptide of (a), (b) or (c) has at least one biological activity as described above for the subject amino acid sequence from the indicated pathogen, and wherein the polypeptide of (a), (b) or (c) is in crystal form.
[1006] 15. A crystallized complex comprising the crystallized, recombinant polypeptide of paragraph 14 and a co-factor, wherein the complex is in crystal form.
[1007] 16. A crystallized complex comprising the crystallized, recombinant polypeptide of paragraph 14 and a small organic molecule, wherein the complex is in crystal form.
[1008] 17. The crystallized, recombinant polypeptide of paragraph 14, which diffracts x-rays to a resolution of about 3.5 A or better.
[1009] 18. The crystallized, recombinant polypeptide of paragraph 14, wherein the polypeptide comprises at least one heavy atom label.
[1010] 19. The crystallized, recombinant polypeptide of paragraph 18, wherein the polypeptide is labeled with seleno-methionine.
[1011] 20. A sample comprising an isolated, recombinant polypeptide, wherein the polypeptide comprises: (a) a subject amino acid sequence; (b) an amino acid sequence having at least about 95% identity with the subject amino acid sequence; or (c) an amino acid sequence encoded by a polynucleotide that hybridizes under stringent conditions to the complementary strand of a polynucleotide having the subject nucleic acid sequence that corresponds to the subject amino acid sequence; wherein the polypeptide of (a), (b) or (c) has at least one biological activity as described above for the subject amino acid sequence from the indicated pathogen, and wherein the polypeptide of (a), (b) or (c) is enriched in at least one NMR isotope.
[1012] 21. The sample of paragraph 20, wherein the NMR isotope is one of the following: hydrogen-1 (¹H), hydrogen-2 (²H), hydrogen-3 (³H), phosphorous-31 (³¹P), sodium-23 (²³Na), nitrogen-14 (¹N), nitrogen-15 (¹⁵N), carbon-13 (¹³C) and fluorine-19 (¹⁹F).
[1013] 22. The sample of paragraph 20, further comprising a deuterium lock solvent.
[1014] 23. The sample of paragraph 22, wherein the deuterium lock solvent is one of the following: acetone (CD₃COCD₃), chloroform (CDCl₃), dichloro methane (CD₂Cl₂), methylnitrile (CD₃CN), benzene (C₆D₆), water (D₂O), diethylether ((CD₃CD₂)₂O), dimethylether ((CD₃)₂O), N,N-dimethylformamide ((CD₃)₂NCDO), dimethyl sulfoxide (CD₃SOCD₃), ethanol (CD₃CD₂OD), methanol (CD₃OD), tetrahydrofuran (C₄D₈O), toluene (C₆D₅CD₃), pyridine (C₅D₅N) and cyclohexane (C₆H₁₂).
[1015] 24. The sample of paragraph 20, which is contained within an NMR tube.
[1016] 25. A method for identifying small molecules that bind to a polypeptide of the composition of paragraph 1, comprising:
   [1017] (a) generating a first NMR spectrum of an isotopically labeled polypeptide of the composition of paragraph 1;
   [1018] (b) exposing the polypeptide to one or more small molecules;
   [1019] (c) generating a second NMR spectrum of the polypeptide which has been exposed to one or more small molecules; and
   [1020] (d) comparing the first and second spectra to determine differences between the first and the second spectra, wherein the differences are indicative of one or more small molecules that have bound to the polypeptide.
[1021] 26. A host cell comprising a nucleic acid encoding a polypeptide comprising: (a) a subject amino acid sequence; (b) an amino acid sequence having at least about 95% identity with the subject amino acid sequence; or (c) an amino acid sequence encoded by a polynucleotide that hybridizes under stringent conditions to the complementary strand of a polynucleotide having the subject nucleic acid sequence that corresponds to the subject amino acid sequence; wherein the polypeptide of (a), (b) or (c) has at least one biological activity as described above for the subject amino acid sequence from the indicated pathogen, and wherein a culture of the host cell produces at least about 1 mg of the polypeptide per liter of culture and the polypeptide is at least about one-third soluble as measured by gel electrophoresis.
[1022] 27. An isolated, recombinant polypeptide, comprising: (a) an amino acid sequence having at least about 90% identity with a subject amino acid sequence; or (b) an amino acid sequence encoded by a polynucleotide that hybridizes under stringent conditions to the complementary strand of a polynucleotide having the subject nucleic acid sequence that corresponds to the subject amino acid sequence; wherein the polypeptide of (a) or (b) has at least one biological activity as described above for the subject amino acid sequence from the indicated pathogen, and wherein the polypeptide comprises one or more amino acid residues from the subject amino acid sequence (experimental) at the position(s) of the polypeptide for which the subject amino acid sequence (experimental) differs from the subject amino acid sequence (predicted).

[1023] Other exemplary embodiments are described in the patent applications that are incorporated by reference herein, including all those listed in the Related Application Information. All of those exemplary embodiments are hereby incorporated in this application as if they were included here. Further, the originally filed dependent claims of this application are intended to apply to all the originally filed independent claims (in addition to the one to which dependency is expressly made), and thus the dependent claims further describe various aspects of all the polypeptides of the invention.

### Exemplification

[1024] The invention now being generally described, it will be more readily understood by reference to the following examples which are included merely for purposes of illustration of certain aspects and embodiments of the present invention, and are not intended to limit the invention in any way.

### EXAMPLE 1

### Isolation and Cloning of Nucleic Acid

[1025] Staphylococcus aureus is a Gram-positive cocci that is implicated in a wide number of skin infections, and is of particular concern in hospitals and other health institutions. The high virulence of the organism and the ability of many strains to resist numerous anti-microbial agents, presents difficult therapeutic issues. S. aureus polynucleotide sequences were obtained from The Institute of Genomic Research (TIGR) (Rockville, Md.; www.tigr.org). S. aureus genomic DNA is extracted from a crushed cell pellet (strain ColA) and subjected to 10% sucrose and 2% SDS in a 60° C. water bath, followed by the addition of 1 M NaCl for a 40 minute incubation on ice. Impurities, including RNA and proteins, are removed by enzymatic degradation via RNAse and phenol-chloroform extractions, respectively. The DNA is then precipitated, washed with ethanol, and quantified by UV absorption.

[1026] Helicobacter pylori is a Gram-negative spiral bacteria infecting approximately 50% of the world's population. It is the only known microorganism to inhabit the human stomach. It causes chronic gastritis and duodenal and gastric ulcers. As well, it has been implicated in gastric cancer and non-Hodgkin's lymphoma. Recently it has been characterized as a group I carcinogen by the World Health Organization. H. pylori polynucleotide sequences were obtained from NCBI at ftp://ncbi.nlm.nih.gov/genbank/genomes/Bacteria/Helicobacter_pylori_{—}26695/. H. pylori chromosomal DNA was acquired from the American Type Culture Collection (ATCC; reference #43504D).

[1027] Escherichia coli is a rod shaped Gram-negative bacteria found ubiquitously in the human intestinal tract. When this bacteria spreads to sites outside the intestinal tract, it can cause disease. It is responsible for three types of infections in humans: urinary tract infections (UTI), neonatal meningitis, and intestinal diseases (gastroenteritis). E. coli Polynucleotide sequences were obtained from NCBI at ftp://ncbi.nlm.nih.gov/genbank/genomes/Bacteria/Escherichia_coli_K12/. E. coli DNA is extracted from a crushed cell pellet (strain K12) and subjected to 10% sucrose and 2% SDS in a 60° C. water bath, followed by the addition of 1 M NaCl for a 40 minute incubation on ice. The impurities, including RNA and proteins were removed by enzymatic degradation via RNAse, and phenol-chloroform extractions, respectively. The DNA was precipitated, washed with ethanol, and quantified by UV absorption.

[1028] Streptococcus pneumoniae are paired, alpha-hemolytic, Gram-positive cocci. It is the leading cause of bacterial pneumonia and it is also implicated as a significant pathogenic agent in the development of bronchial infections, sinusitis and meningitis. The increasing prevalence of strains that are resistant to anti-microbial agents makes this an even more deadly pathogen. Polynucleotide sequences were obtained from The Institute of Genomic Research (TIGR) (Rockville, Md.; www.tigr.org). DNA is extracted from a crushed cell pellet and and subjected to 10% sucrose and 2% SDS in a 60° C. water bath, followed by the addition of 1 M NaCl for a 40 minute incubation on ice. The impurities, including RNA and proteins, were removed by enzymatic degradation via RNAse, and phenol-chloroform extractions, respectively. The DNA was precipitated, washed with ethanol, and quantified by UV absorption.

[1029] Pseudomonas aeruginosa is an opportunistic Gram-negative bacilli found in sewage, plants, and sometimes the intestine. It is capable of infecting various organs and has been identified in numerous infections including those in the ears, lungs, urinary tract, blood and in bums and surgical wound infections. Polynucleotide sequences were obtained from The Institute of Genomic Research (TIGR) (Rockville, Md.; www.tigr.org). Chromosomal DNA was acquired from the American Type Culture Collection (ATCC; reference #17933D).

[1030] Enterococcus faecalis is a facultative Gram-positive anaerobe bacteria that is associated with both community and hospital acquired infections. Approximately 80% of enteroccocal infections in humans are caused by E. faecalis. The most common enterococcal-associated nosocomial infections are infections of the urinary tract, followed by surgical wound infections and bacteremia. Other enterococcal infections include intra abdominal and pelvic infections, central nervous system infections, and in rare instances, osteomyelitis and pulmonary infections. The high virulence of the organism and the ability of many strains to resist numerous anti-microbial agents, presents difficult therapeutic issues. Most enterococci are relatively resistant to penicillin, ampicillin, and the ureidopenicillins. E. faecalis polynucleotide sequences were obtained from The Institute of Genomic Research (TIGR) (Rockville, Md.; www.tigr.org). E. faecalis genomic DNA is extracted from a crushed cell pellet (strain V583) and and subjected to 10% sucrose and 2% SDS in a 60° C. water bath, followed by the addition of 1 M NaCl for a 40 minute incubation on ice. Impurities, including RNA and proteins, are removed by enzymatic degradation via RNAse and phenol-chloroform extractions, respectively. The DNA is then precipitated, washed with ethanol, and quantified by UV absorption.

[1031] The coding sequences of the subject nucleic acid sequences (predicted) are obtained by reference to either publicly available databases or from the use of a bioinformatics program that is used to select the coding sequence of interest from the applicable genome. For example, bioinformatics programs that may be used to select the coding sequence of interest from the genome of S. aureus include that described in Nucleic Acids Research, 1999, 27:46364641 and the ContigExpress and Translate functionalities of Vector NTI Suite (InforMax). For example, coding sequences for the genome of H. pylori may be obtained from NCBI (http:/www.ncbi.nlm.nih.gov/cgi-bin/Entrez/altik?gi=128&db=Genome). For example, coding sequences for the genome of E. coli may be obtained from NCBI (http://www.ncbi.nlm.nih.gov/cgi-bin/Entrez/altik?gi=115&db=Genome). For example, bioinformatics programs that may be used to select the coding sequence of interest from the genome of S. pneumoniae include that described in Nucleic Acids Research, 1999, 27:46364641 and the ContigExpress and Translate functionalities of Vector NTI Suite (InforMax). For example, coding sequences for the genome of P. aeruginosa may be obtained from NCBI (http://www.ncbi.nlm.nih.gov/cgi-bin/Entrez/framik?db=Genome&gi=163). For example, bioinformatics programs that may be used to select the coding sequence of interest from the genome of E. faecalis include that described in Nucleic Acids Research, 1999, 27:4636-4641 and the ContigExpress and Translate functionalities of Vector NTI Suite (InforMax).

[1032] The subject nucleic acid sequences (experimental) are amplified from purified genomic DNA using PCR with primers that are identified with a computer program using the corresponding subject nucleic acid sequences (predicted). The PCR primers are selected so as to introduce restriction enzyme cleavage sites at the flanking regions of the DNA (e.g., Nde1 and BglII). The nucleic acid sequences for the forward and reverse primers for each of the subject nucleic acid sequences (experimental) are shown in the appropriate Figures, as described above, with their respective restriction sites and melting temperatures shown in the applicable Table contained in the Figures.

[1033] The PCR reaction for each of the subject nucleic acid sequences (experimental) is performed using 50-100 ng of chromosomal DNA and 2 Units of a high fidelity DNA Polymerase (for example Pfu Turbo (Stratagene) or Platinum Pfx (Invitrogen)). The thermocycling conditions for the PCR process include a DNA melting step at 94° C. for 45 sec, a primer annealing step at 48° C.-58” C. (depending on Primer [Tm]) for 45 sec, and an extension step at 68° C.-72° C. (depending on enzyme) for 1 min 45 sec-2 min 30 sec (depending on size of DNA). After 25-30 cycles, a final blocking step at 72° C. for 9 min is carried out. The amplified nucleic acid product is isolated from the PCR cocktail using silica-gel membrane based column chromatography (Qiagen). The quality of the PCR product is assessed by resolving an aliquot of amplified product on a 1% agarose gel. The DNA is quantified spectrophotometrically at A₂₆₀ or by visualizing the resolved genes with a 302 nm UV-B light source.

[1034] The PCR product for each of the subject nucleic acid sequences (experimental) is directionally cloned into the polylinker region of any of three expression vectors: pET28 (Novagen), pET15 (Novagen) or pGEX (Pharmacia/LKB Biotechnology). Additional restriction enzyme sites may be engineered into the expression vectors to allow for simultaneous clones to be prepared having different purification tags. After the ligation reaction, the DNA is transformed into competent E. coli cells (Strains XL1-Blue (Stratagene) or DH5α (Invitrogen)) via heat shock or electroporation as described in Sambrook, et al., Molecular Cloning: A Laboratory Manual, 2^{nd} Ed., Cold Spring Harbor Laboratory Press, Cold Spring Harbor, N.Y. (1989). The expression vectors contain the bacteriophage T7 promoter for RNA polymerase, and the E. coli strain used produces T7 RNA polymerase upon induction with isopropyl-β-D-thiogalactoside (IPTG). The sequence of the cloning site adds a Glutathione S-transferase (GST) tag, or a polyhistidine (6× His) tag, at the N— or C-terminus of the recombinant protein. The cloning site also inserts a cleavage site for the thrombin or Tev (Invitrogen) enzymes between the recombinant protein and the N— or C-terminal GST or polyhistidine tag.

[1035] Transformants are selected using the appropriate antibiotic (Ampicillin or Kanamycin) and identified using PCR, or another method, to analyze their DNA. The polynucleotide sequence cloned into the expression construct is then isolated using a modified alkaline lysis method (Birnboim, H. C., and Doly, J. (1979) Nucl. Acids Res. 7, 1513-1522.) The sequence of the clone is verified by standard polynucleotide sequencing methods. The various nucleic and amino acid sequences for the different polypeptides of the invention are presented in the Figures.

[1036] The expression construct containing a subject nucleic acid (experimental) is transformed into a bacterial host strain BL21-Gold (DE3) supplemented with a plasmid called pUBS520, which directs expression of tRNA for arginine (agg and aga) and serves to augment the expression of the recombinant protein in the host cell (Gene, vol. 85 (1989) 109-114). The expression construct may also be transformed into BL21-Gold (DE3) without pUBS520, BL21-Gold (DE3) Codon-Plus (RIL) or (RP) (Stratagene) or Roseatta (DE3) (Novagen), the latter two of which contain genes encoding tRNAs. Alternatively, the expression construct may be transformed into BL21 STAR E. coli (Invitrogen) cells which has an Rnase deficiency that reduces degradation of recombinant mRNA transcript and therefore increases the protein yield. The recombinant protein is then assayed for positive overexpression in the host and the presence of the protein in the cytoplasmic (water soluble) region of the cell.

### EXAMPLE 2

### Test Protein Expression and Solubility

[1037] (a) Test Expression

[1038] Transformed cells are grown in LB medium supplemented with the appropriate antibiotics up to a final concentration of 100 μg/ml. The cultures are shaken at 37° C. until they reach an optical density (OD600) between 0.6 and 0.7. The cultures are then induced with isopropyl-beta-D-thiogalactopyranoside (IPTG) to a final concentration of 0.5 mM at 15° C. for 10 hours, 25° C. for 4 hours, or 30° C. for 4 hours.

[1039] (b) Method One for Determining Protein Solubility Levels

[1040] The cells are harvested by centrifugation and subjected to a freeze/thaw cycle. The cells are lysed using detergent, sonication, or incubation with lysozyme. Total and soluble proteins are assayed using a 26-well BioRad Criterion gel running system. The proteins are stained with an appropriate dye (Coomassie, Silver stain, or Sypro-Red) and visualized with the appropriate visualization system. Typically, recombinant protein is seen as a prominent band in the lanes of the gel representing the soluble fraction.

[1041] (c) Method Two for Determining Protein Solubility Levels

[1042] The soluble and insoluble fractions (in the presence of 6M urea) of the cell pellet are bound to the appropriate affinity column. The purified proteins from both fractions are analysed by SDS-PAGE and the levels of protein in the soluble fraction are determined The approximate percent solubility of a polypeptide of a subject amino acid sequence (experimental) is determined using one of the two foregoing methods, and the resulting percent solubility is presented in the applicable Table contained in the Figures.

### EXAMPLE 3

### Native Protein Expression

[1043] The expression construct clone comprising one of the subject amino acid sequences (experimental) is introduced into an expression host. The resultant cell line is then grown in culture. The method of growth is dependant on whether the protein to be purified is a native protein or a labeled protein. For native and ¹⁵N labeled protein production, a Gold-pUBS520 (as described above), BL21-Gold (DE3) Codon-Plus (RIL) or (RP), or BL21 STAR E. Coli cell line is used. For generating proteins metabolically labeled with selenium, the clone is introduced into a strain called B834 (Novagen). The methods for expressing labeled polypeptides of the invention are described in the Examples that follow.

[1044] In one method for expressing an unlabeled polypepetide of the invention, 2 L LB cultures or 1 L TB cultures are inoculated with a 1% (v/v) starter culture (OD₆₀₀ of 0.8). The cultures are shaken at 37° C. and 200 rpm and grown to an OD₆₀₀ of 0.6-0.8 followed by induction with 0.5mM IPTG at 15° C. and 200 rpm for at least 10 hours or at 25° C. for 4 hours. The cells are harvested by centrifugation and the pellets are resuspended in 25 ml HEPES buffer (50 mM, pH 7.5), supplemented with 100 μl of protease inhibitors (PMSF and benzarnidine (Sigma)) and flash-frozen in liquid nitrogen.

[1045] Alternatively, for an unlabeled polypeptide of the invention, a starter culture is prepared in a 300 mL Tunair flask (Shelton Scientific) by adding 20 mL of medium having 47.6 g/L of Terrific Broth and 1.5% glycerol in dH₂O followed by autoclaving for 30 minutes at 121° C. and 15 psi. When the broth cools to room temperature, the medium is supplemented with 6.3 μM CoCl₂-6H₂O, 33.2 μM MnSO₄-5H₂O, 5.9 μM CuCl₂-2H₂O, 8.1 μM H₃BO₃, 8.3 μM Na₂MoO₄-2H₂O, 7 μM ZnSO₄-7H₂O, 108 μM FeSO₄-7H₂O, 68 μM CaCl₂-2H₂O, 4.1 μM AlCl₃-6H₂O, 8.4 μM NiCl₂-6H₂O, 1 mM MgSO₄, 0.5% v/v of Kao and Michayluk vitamins mix (Sigma; Cat. No. K3129), 25 μg/mL Carbenicillin, and 50 μg/mL Kanamycin. The medium is then inoculated with several colonies of the freshly transformed expression construct of interest. The culture is incubated at 37° C. and 260 rpm for about 3 hours and then transferred to a 2.5 L Tunair Flask containing 1 L of the above media. The 1 L culture is then incubated at 37° C. with shaking at 230-250 rpm on an orbital shaker having a 1 inch orbital diameter. When the culture reaches an OD₆₀₀ of 3-6 it is induced with 0.5 mM IPTG. The induced culture is then incubated at 15° C. with shaking at 230-250 rpm or faster for about 6-15 hours. The cells are harvested by centrifugation at 3500 rpm at 4° C. for 20 minutes and the cell pellet is resuspended in 15 mL ice cold binding buffer (Hepes 50 mM, pH 7.5) and 100 μl of protease inhibitors (50 mM PMSF and 100 mM Benzamidine, stock concentration) and flash frozen.

### EXAMPLE 4

### Expression of Selmet Labeled Polypeptides

[1046] The cell harboring a plasmid with the nucleic acid sequence of interest is inoculated into 20 ml of NMM (New Minimal Medium) and shaken at 37° C. for 8-9 hours. This culture is then transferred into a 6 L Erlenmeyer flask containing 2 L of minimum medium (M9). The media is supplemented with all amino acids except methionine. All amino acids are added as a solution except for Tyrosine, Tryptophan and Phenylalanine which are added to the media in powder format. As well the media is supplemented with MgSO₄ (2mM final concentration), FeSO₄.7H₂O (25 mg/L final concentration), Glucose (0.4% final concentration), CaCl₂ (0.1 mM final concentration) and Seleno-L-Methionine (40 mg/L final concentration). When the OD₆₀₀ of the cell culture reaches 0.8-0.9, IPTG (0.4 mM final concentration) is added to the medium for protein induction, and the cell culture is kept shaking at 15° C. for 10 hours. The cells are harvested by centrifugation at 3500 rpm at 4° C. for 20 minutes and the cell pellet is resuspended in 15 mL cold binding buffer (Hepes 50 mM, pH 7.5) and 100 μl of protease inhibitors (PMSF and Benzamidine) and flash frozen.

[1047] Alternatively, a starter culture is prepared in a 300 mL Tunair flask (Shelton Scientific) by adding 50 mL of sterile medium having 10% 10×M9 (37.4 mM NH₄Cl (Sigma; Cat. No. A4514), 44 mM KH₂PO₄ (Bioshop, Ontario, Canada; Cat. No. PPM 302), 96 mM Na₂HPO₄ (Sigma; Cat. No. S2429256), and 96 mM Na₂HPO₄.7H₂O (Sigma; Cat. No. S9390) final concentration), 450 μM alanine, 190 μM arginine, 302 μM asparagine, 300 μM aspartic acid, 330 μM cysteine, 272 μM glutamic acid, 274 μM glutamine, 533 μM glycine, 191 μM histidine, 305 μM isoleucine, 305 μM leucine, 220 μM lysine, 242 μM phenylalanine, 348 μM proline, 380 μM serine, 336 μM threonine, 196 μM tryptophan, 220 μM tyrosine, and 342 μM valine, 204 μM Seleno-L-Methionine (Sigma; Cat. No. S3132), 0.5% v/v of Kao and Michayluk vitamins mix (Sigma; Cat. No. K3129), 2 mM MgSO₄ (Sigma; Cat. No. M7774), 90 μM FeSO₄.7H₂O (Sigma; Cat. No. F8633), 0.4% glucose (Sigma; Cat. No. G-5400), 100 μM CaCl₂ (Bioshop, Ontario, Canada; Cat. No. CCL 302), 50 μg/mL Ampicillin, and 50 μg/mL Kanamycin in dH₂O. The medium is then inoculated with several colonies of E. coli B834 cells (Novagen) freshly transformed with an expression construct clone encoding the polypeptide of interest. The culture is then incubated at 37° C. and 200 rpm until it reaches an OD₆₀₀ of ˜1 and is then transferred to a 2.5 L Tunair Flask containing 1 L of the above media. The 1 L culture is incubated at 37° C. with shaking at 200 rpm until the culture reaches an OD₆₀₀ of 0.6-0.8 and is then induced with 0.5 mM IPTG. The induced culture is incubated overnight at 15° C. with shaking at 200 rpm. The cells are harvested by centrifugation at 4200 rpm at 4° C. for 20 minutes and the cell pellet is resuspended in 15 mL ice cold binding buffer (Hepes 50 mM, pH 7.5) and 100 μl of protease inhibitors (50 mM PMSF and 100 mM Benzamidine, stock concentration) and flash frozen.

[1048] Alternatively, the cell harboring a plasmid with the nucleic acid sequence of interest is inoculated into 10 ml of M9 minimum medium and kept shaking at 37° C. for 8-9 hours. This culture is then transferred into a 2 L Baffled Flask (Corning) containing 1 L minimum medium. The media is supplemented with all amino acids except methionine. All are added as a solution, except for Phenylalanine, Alanine, Valine, Leucine, Isoleucine, Proline, and Tryptophan which are added to the media in powder format. As well the media is supplemented with MgSO₄ (2mM final concentrtion), FeSO₄.7H₂O (25 mg/L final concentration), Glucose (0.5% final concentration), CaCl₂ (0.1 mM final concentration) and Seleno-Methionine (50 mg/L final concentration). When the OD₆₀₀ of the cell culture reaches 0.8-0.9, IPTG (0.8 mM final concentration) is added to the medium for protein induction, and the cell culture is kept shaking at 25° C. for 4 hours. The cells are harvested by centrifuged at 3500 rpm at 4° C. for 20 minutes and the cell pellet is resuspended in 10 mL cold binding buffer (Hepes 50 mM, pH 7.5) and 100 μl of protease inhibitors (PMSF and Benzamidine) and flash frozen.

### EXAMPLE 5

### Expression of ¹⁵N Labeled Polypeptides

[1049] The cell harboring a plasmid with the nucleic acid sequence of interest is inoculated into 2 L of minimal media (containing ¹⁵N isotope, Cambridge Isotope Lab) in a 6 L Erlenmeyer flask. The minimal media is supplemented with 0.01 mM ZnSO₄, 0.1 mM CaCl₂, 1 mM MgSO₄, 5 mg/L Thiamine HCl, and 0.4% glucose. The 2 L culture is grown at 37° C. and 200 rpm to an OD₆₀₀ of between 0.7-0.8. The culture is then induced with 0.5 mM IPTG and allowed to shake at 15° C. for 14 hours. The cells are harvested by centrifugation and the cell pellet is resuspended in 15 mL cold binding buffer and 100 μl of protease inhibitor and flash frozen. The protein is then purified as described below.

[1050] Alternatively, the cell, harboring a plasmid with the nucleic acid sequence of the invention, is inoculated into 10 mL of M9 media (with ¹⁵N isotope) and supplemented with 0.01 mM ZnSO₄, 0.1 mM CaCl₂, 1 mM MgSO₄, 5 mg/L Thiamine HCl, and 0.4% glucose. After 8-10 hours of growth at 37° C., the culture is transferred to a 2 L Baffled flask (Corning) containing 990 mL of the same media. When OD₆₀₀ of the culture is between 0.7-0.8, protein production is initiated by adding IPTG to a final concentration of 0.8 mM and lowering the temperature to 25° C. After 4 hours of incubation at this temperature, the cells are harvested, and the cell pellet is resuspended in 10 mL cold binding buffer (Hepes 50 mM, pH 7.5) and 100 μl of protease inhibitor and flash frozen.

### EXAMPLE 6

### Method One for Purifying Polypeptides of the Invention

[1051] The frozen pellets are thawed and sonicated to lyse the cells (5×30 seconds, output 4 to 5, 80% duty cycle, in a Branson Sonifier, VWR). The lysates are clarified by centrifugation at 14,000 rpm for 60 min at 4° C. to remove insoluble cellular debris. The supernatants are removed and supplemented with 1 μl of Benzonase Nuclease (25 U/μl, Novagen).

[1052] The recombinant protein is purified using DE52 (anion exchanger, Whatman) and Ni—NTA columns (Qiagen). The DE52 columns (30 mm wide, Biorad) are prepared by mixing 10 grams of DE52 resin in 25 ml of 2.5 M NaCl per protein sample, applying the resin to the column and equilibrating with 30 ml of binding buffer (50 mM in HEPES, pH 7.5, 5% glycerol (v/v), 0.5 M NaCl, 5 mM imidazole). Ni—NTA columns are prepared by adding 3.5-8 ml of resin to the column (20 mm wide, Biorad) based on the level of expression of the recombinant protein and equilibrating the column with 30 ml of binding buffer. The columns are arranged in tandem so that the protein sample is first passed over the DE52 column and then loaded directly onto the Ni—NTA column.

[1053] The Ni—NTA columns are washed with at least 150 ml of wash buffer (50 mM HEPES, pH 7.5, 5% glycerol (v/v), 0.5 M NaCl, 30 mM imidazole) per column. A pump may be used to load and/or wash the columns. The protein is eluted off of the Ni—NTA column using elution buffer (50 mM in HEPES, pH 7.5, 5% glycerol (v/v), 0.5 M NaCl, 250 mM imidazole) until no more protein is observed in the aliquots of eluate as measured using Bradford reagent (Biorad). The eluate is supplemented with 1 mM of EDTA and 0.2 mM DTT.

[1054] The samples are assayed by SDS-PAGE and stained with Coomassie Blue, with protein purity determined by visual staining.

[1055] Two methods may be used to remove the His tag located at either the C or N-terminus. In certain instances, the His tag may not be removed. In either case, the expressed polypeptide will have additional residues attributable to the His tag, as shown in the following table:

| SEQ ID NO for | | Type of Tag and |
|---|---|---|
| Additional Residues | Additional Residues | Whether or Not Removed |
| | GSH | His tag removed from |
| | | N-terminus |
| SEQ ID NO: 1 | MGSSHHHHHHSSGLVPRGSH | His tag not removed from |
| | | N-terminus |
| SEQ ID NO: 2 | GSENLYFQGHHHHHH | His tag removed from |
| | | C-terminus |
| SEQ ID NO: 3 | GSENLYFQ | His tag not removed from |
| | | C-terminus |

[1056] In method one, a sample of purified polypeptide is supplemented with 2.5 mM CaCl₂ and an appropriate amount of thrombin (the amount added will vary depending on the activity of the enzyme preparation) and incubated for ˜20-30 minutes on ice in order to remove the His tag. In method two, a sample of purified polypeptide is combined with thirty units of recombinant TEV protease in 50 mmol TRIS HCl pH=8.0, 0.5 mmol EDTA and 1 mmol DTT, followed by incubation at 4° C. overnight, to remove the His tag.

[1057] The protein sample is then dialyzed in dialysis buffer (10 MM HEPES, pH 7.5, 5% glycerol (v/v) and 0.5 M NaCl) for at least 8 hours using a Slide-A-Lyzer (Pierce) appropriate for the molecular weight of the recombinant protein. An aliquot of the cleaved and dialyzed samples is then assayed by SDS-PAGE and stained with Coomassie Blue to determine the purity of the protein and the success of cleavage.

[1058] The remainder of the sample is centrifuged at 2700 rpm at 4° C. for 10-15 minutes to remove any precipitant and supplemented with 100 μl of protease inhibitor cocktail (0.1 M benzamidine and 0.05 M PMSF) (NO Bioshop). The protein is then applied to a second Ni—NTA column (˜8 ml of resin) to remove the His-tags and eluted with binding buffer or wash buffer until no more protein is eluting off the column as assayed using the Bradford reagent. The eluted sample is supplemented with 1 mM EDTA and 0.6 mM of DTT and concentrated to a final volume of ˜15 mls using a Millipore Concentrator with an appropriately sized filter at 2700 rpm at 4° C. The samples are then dialyzed overnight against crystallization buffer and concentrated to final volume of 0.3-0.7 ml.

### EXAMPLE 7

### Method Two for Purifying Polypeptides of the Invention

[1059] The frozen pellets are thawed and supplemented with 100 μl of protease inhibitor (0.1 M benzamidine and 0.05 M PMSF), 0.5% CHAPS, and 4 U/ml Benzonase Nuclease. The sample is then gently rocked on a Nutator (VWR, setting 3) at room temperature for 30 minutes. The cells are then lysed by sonication (1×30 seconds, output 4 to 5, 80% duty cycle, in a Branson Sonifier, VWR) and an aliquot is saved for a gel sample.

[1060] The recombinant protein is purified using a three column system. The columns are set up in tandem so that the lysate flows from a Biorad Econo (5.0×30 cm×589 ml) “lysate” column onto a Biorad Econo (2.5×20 cm×98 ml) DE52 column and finally onto a Biorad Econo (1.5×15 cm×27 ml) Ni—NTA column. The lysate is mixed with 10 g of equilibrated DE52 resin and diluted to a total volume of 300 ml with binding buffer. This mixture is poured into the first column which is empty. The remainder of the purification procedure is described in EXAMPLE 6 above.

### EXAMPLE 8

### Method Three for Purifying Polypeptides of the Invention

[1061] The frozen pellets are thawed and sonicated to lyse the cells (5×30 seconds, output 4 to 5, 80% duty cycle, in a Branson Sonifier, VWR). The lysates are clarified by centrifugation at 14000 rpm for 60 min at 4° C. to remove insoluble cellular debris. The supernatants are removed and supplemented with 1 g of Benzonase Nuclease (25 U/μl, Novagen).

[1062] The recombinant protein is purified using DE52 (anion exchanger, Whatman) and Glutathione sepharose columns (Glutathione-Superflow resin, Clontech). The DE52 columns (30 mm wide, Biorad) are prepared by mixing 10 grams of DE52 resin in 20 ml of 2.5 M NaCl per protein sample, applying the resin to the column and equilibrating with 30 ml of loading buffer (50 mM in HEPES, pH 7.5, 10% glycerol (v/v), 0.5 M NaCl, 1 mM EDTA, 1 mM DTT). Glutathione sepharose columns are prepared by adding 3 ml of resin to the column (20 mm wide, Biorad) and equilibrating the column with 30 ml of loading buffer. The columns are arranged in tandem so that the protein sample is first passed over the DE52 column and then loads directly onto the Glutathione sepharose column.

[1063] The columns are washed with at least 150 ml of loading buffer supplemented with protease inhibitor cocktail (0.1 M benzamidine and 0.05 M PMSF) per column. A pump may be used to load and/or wash the columns. The protein is eluted off of the Glutathione sepharose column using elution buffer (20 mM HEPES, pH 7.5, 0.5 M NaCl, 1 mM EDTA, 1 mM DTT; 25 mM glutathione (reduced form)) until no more protein is observed in the aliquots of eluate as measured using Biorad Bradford reagent.

[1064] The GST tag may be removed using thrombin or other procedures known in the art. The protein samples are then dialyzed into crystallization buffer (10 mM Hepes, pH 7.5, 500 mM NaCl) to remove free glutathione and assayed by SDS-PAGE followed by staining with Coomassie blue. Prior to use or storage, the samples are concentrated to final volume of 0.3-0.5 ml.

[1065] The Tables contained in the Figures set forth the results of expressing and purifying certain of the polypeptides of the invention using the procedures described above. Prepared and purified in this way, the purified polypeptides are essentially the only protein visualized in the SDS-PAGE assay using Coomassie Blue described above, which is at least about 95% or greater purity.

[1066] The protein samples so prepared and purified may be used in the studies that follow and that are otherwise described herein, with or without the tag or the residual amino acids resulting from removal of the tag. In certain instances, such as EXAMPLE 11, the polypeptide sample used may be a fusion protein with a specific tag.

[1067] A stable solution of certain of the expressed polypeptides, labeled and unlabeled, tagged and untagged, may be prepared in one ml of either the dialysis or crystallization buffers (or possibly both) described above in EXAMPLE 6 or EXAMPLE 8. The results of those solubility experiements are set forth in the applicable Table contained in the Figures.

[1068] For certain polypeptides of the invention, truncated polypeptides are prepared. Truncated polypeptides are generated via a “shot gun” approach whereby 1 to about 15 or more residues may be deleted from the N and/or C termini of the polypeptide of interest in a sequential pattern, in a variety of combinations of deletions. Alternatively, truncated polypeptides may be prepared by rational design, using multiple sequence alignments of the protein and other orthologues, secondary structure prediction and tertiary structure of a related protein (if available) as guiding tools. In such cases, from 1 to about 20 amino acids or more may be deleted from the N and/or C termini. Truncated constructs are PCR amplified from genomic DNA and cloned into expression vectors as described above for the various pathogens. Truncation constructs are then tested for expression and solubility as described above. The most highly expressed and soluble truncated polypeptides may be subject to further purification and characterization as provided herein.

### EXAMPLE 9

### Mass Spectrometry Analysis via Fingerprint Mapping

[1069] A gel slice from a purification protocol described above containing a polypeptide of the invention is cut into 1 mm cubes and 10 to 20 μl of 1% acetic acid is added. After washing with 100-150 μl HPLC grade water and removal of the liquid, acetonitrile (˜200 μl, approximately 3 to 4 times the volume of the gel particles) is added followed by incubation at room temperature for 10 to 15 minutes with vortexing. A second acetonitrile wash may be required to completely dehydrate the gel particles. The protein in the gel particles is reduced at 50 degrees Celsius using 10 mM dithiothreitol (in 100 mM ammonium bicarbonate) and then alkylated at room temperature in the dark using 55 mM iodoacetamide (in 100 mM ammonium bicarbonate). The gel particles are rinsed with a minimal volume of 100 mM ammonium bicarbonate before a trypsin (50 mM ammonium bicarbonate, 5 mM CaCl₂, and 12.5 ng/μl trypsin) solution is added. The gel particles are left on ice for 30 to 45 minutes (after 20 minutes incubation more trypsin solution is added). The excess trypsin solution is removed and 10 to 15 μl digestion buffer without trypsin is added to ensure the gel particles remain hydrated during digestion. After digestion at 37° C., the supernatant is removed from the gel particles. The peptides are extracted from the gel particles with 2 changes of 100 μL of 100 mM ammonium bicarbonate with shaking for 45 minutes and pooled with the initial gel supernatant. The extracts are acidified to 1% (v/v) with 100% acetic acid.

[1070] The tryptic peptides are purified with a C18 reverse phase resin. 250 μL of dry resin is washed twice with methanol and twice with 75% acetonitrile/1% acetic acid. A 5:1 slurry of solvent:resin is prepared with 75% acetonitrile/1% acetic acid. To the extracted peptides, 2 μL of the resin slurry is added and the solution is shaken for 30 minutes at room temperature. The supernatant is removed and replaced with 200 μL of 2% acetonitrile/1% acetic acid and shaken for 5-15 minutes. The supernatant is removed and the peptides are eluted from the resin with 15 μL of 75% acetonitrile/1% acetic acid with shaking for about 5 minutes. The peptide and slurry mixture is applied to a filter plate and centrifuged, and the filtrate is collected and stored at −70° C. until use.

[1071] Alternatively, the tryptic peptides are purified using ZipTip_{C18} (Millipore, Cat #ZTC18S960). The ZipTips are first pre-wetted by aspirating and dispensing 100% methanol. The tips are then washed with 2% acetonitrile/1% acetic acid (5 times), followed by 65% acetonitrile/1% acetic (5 times) and returned to 2% acetonitrile/1% acetic acid (10 times). The digested peptides are bound to the ZipTips by aspirating and dispensing the samples 5 times. Salts are removed by washing ZipTips with 2% acetonitrile/1% acetic acid (5 times). 10 μL of 65% acetonitrile/1% acetic acid is collected by the ZipTips and dispensed into a 96-well microtitre plate.

[1072] Analytical samples containing tryptic peptides are subjected to MALDI-TOF mass spectrometry. Samples are mixed 1:1 with a matrix of α-cyano4-hydroxy-trans-cinnamic acid. The sample/matrix mixture is spotted on to the MALDI sample plate with a robot, either a Gilson 215 liquid handler or BioMek FX laboratory automation workstation (Beckman). The sample/matrix mixture is -allowed to dry on the plate and is then introduced into the mass spectrometer. Analysis of the peptides in the mass spectrometer is conducted using both delayed extraction mode (400 ns delay) and an ion reflector to ensure high resolution of the peptides.

[1073] Internally-calibrated tryptic peptide masses are searched against databases using a correlative mass matching algorithm. The Proteometrics software package (ProteoMetrics) is utilized for batch database searching of tryptic peptide mass spectra. Statistical analysis is performed on each protein match to determine its validity. Typical search constraints include error tolerances within 0.1 Da for monoisotopic peptide masses, carboxyamidomethylation of cysteines, no oxidation of methionines allowed, and 0 or 1 missed enzyme cleavages. The software calculates the probability that a candidate in the database search is the protein being analyzed, which is expressed as the Z-score. The Z-score is the distance to the population mean in unit of standard deviation and corresponds to the percentile of the search in the random match population. If a search is in the 95th percentile, for example, about 5% of random matches could yield a higher Z-score than the search. A Z-score of 1.282 for a search indicates that the search is in the 90th percentile, a Z-score of 1.645 indicates that the search is in the 95th percentile, a Z-score of 2.326 indicates that the search is in the 99th percentile, and a Z-score of 3.090 indicates that the search is in the 99.9th percentile.

[1074] The results of the mass search described above for certain of the polypeptides of the invention are shown in the Figures, and described in the applicable Table contained in the Figures, for each of them. From these experiments, the identity of those polypeptides have been confirmed.

### EXAMPLE 10

### Mass Spectrometry Analysis via High Mass

[1075] A matrix solution of 25 mg/mL of 3,5-dimethoxy-4-hydroxycinnamic acid (sinapinic acid) in 66% (v/v) acetonitrile/1% (v/v) acetic acid is prepared along with an internal calibrant of carbonic anhydrase. On to a stainless steel polished MALDI target, 1.5 μL of a protein solution (concentration of 2 μg/μL) is spotted, followed immediately by 1.5 μL of matrix. 3 μL of 40% (v/v) acetonitrile/1% (v/v) acetic acid is then added to each spot has dried. The sample is either spotted manually or utilizing a Gilson 215 liquid handler or BioMek FX laboratory automation workstation (Beckman). The MALDI-TOF instrument utilizes positive ion and linear detection modes. Spectra are acquired automatically over a mass to charge range from 0-150,000 Da, pulsed ion extraction delay is set at 200 ns, and 600 summed shots of 50-shot steps are completed.

[1076] The theoretical molecular weight of the protein for MALDI-TOF is determined from its amino acid sequence, taking into account any purification tag or residue thereof still present and any labels (e.g., selenomethionine or ¹⁵N). To account for ¹⁵N incorporation, an amount equal to the theoretical molecular weight of the protein divided by 70 is added. The mass of water is subtracted from the overall molecular weight. The MALDI-TOF spectrum is calibrated with the internal calibrant of carbonic anhydrase (observed as either [MH⁺_{avg}] 29025 or [MH₂²⁺] 14513).

[1077] One or more of the Figures display the MALDI-TOF-generated mass spectrum of certain of the polypeptides of the present invention.

[1078] The calculated molecular weight, and the experimentally determined molecular weight, for certain polypeptides of the invention are listed in the applicable Table contained in the Figures. In certain instances, a lower mass to charge peak may also be present, which signifies the presence of doubly-charged molecular ion peak [MH₂²⁺] of the polypeptide.

### EXAMPLE 11

### Method One for Isolating and Identifying Interacting Proteins

[1079] (a) Method One for Preparation of Affinity Column

[1080] Micro-columns are prepared using forceps to bend the ends of P200 pipette tips and adding 10 μl of glass beads to act as a column frit. Six micro-columns are required for every polypeptide to be studied. The micro-columns are placed in a 96-well plate that has 1 μL wells. Next, a series of solutions of a polypeptide comprising a subject amino acid sequence (experimental), prepared and purified as described above and with a GST tag on either terminus, is prepared so as to give final amounts of 0, 0.1, 0.5, 1.0, and 2.0 mg of ligand per ml of resin volume.

[1081] A slurry of Glutathione-Sepharose 4B (Amersham) is prepared and 0.5 ml slurry/ligand is removed (enough for six 40-μg aliquots of resin). Using a glass frit Buchner funnel, the resin is washed sequentially with three 10 ml portions each of distilled H₂O and 1 M ACB (20 mM HEPES pH 7.9, 1 M NaCl, 10% glycerol, 1 mM DTT, and 1 mM EDTA). The Glutathione-Sepharose 4B is completely drained of buffer, but not dried. The Glutathione-Sepharose 4B is resuspended as a 50% slurry in 1 M ACB and 80 μl is added to each micro-column to obtain 40 μg/column. The buffer containing the ligand concentration series is added to the columns and allowed to flow by gravity. The resin and ligand are allowed to cross-link overnight at 4° C. In the morning, micro-columns are washed with 100 μl of 1 M ACB and allowed to flow by gravity. This is repeated twice more and the elutions are tested for cross-linking efficiency by measuring the amount of unbound ligand. After washing, the micro-columns are equilibrated using 200 μl of 0.1 M ACB (20 mM HEPES pH 7.5, 0.1 M NaCl, 10% glycerol, 1 mM DTT, 1 mM EDTA).

[1082] In another method, the recombinant GST fusion protein can be replaced by a hexa-histidine fusion peptide for use with NTA-Agarose (Qiagen) as the solid support. No adaptation to the above protocol is required for the substitution of NTA agarose for GST Sepharose except that the recombinant protein requires a six histidine fusion peptide in place of the GST fusion.

[1083] (b) Method Two for Preparation of Affinity Column

[1084] In an alternative method, GST-Sepharose 4B may be replaced by Affi-gel 10 Gel (Bio-Rad). The column resin for affinity chromatography could also be Affigel 10 resin which allows for covalent attachment of the protein ligand to the micro affinity column. An adaptation to the above protocol for the use of this resin is a pre-wash of the resin with 100% isopropanol. No fusion peptides or proteins are required for the use of Affigel 10 resin.

[1085] (c) Method One for Bacterial Extract Preparation

[1086] A S. aureus extract is prepared from cell pellets using nuclease and lysostaphin digestion followed by sonication. A S. aureus cell pellet (12 g) is suspended in 12 ml of 20 mM HEPES pH 7.5, 150 mM NaCl, 10% glycerol, 10 mM MgSO₄, 10 mM CaCl₂, 1 mM DTF, 1 mM PMSF, 1 mM benzamidine, 1000 units of lysostaphin, 0.5 mg RNAse A, 750 units micrococcal nuclease, and 375 units DNAse I. The cell suspension is incubated at 37° C. for 30 minutes, cooled to 4° C., and brought to a final concentration of 1 mM EDTA and 500 mM NaCl. The lysate is sonicated on ice using three bursts of 20 seconds each. The lysate is centrifuged at 20,000 rpm for 1 hr in a Ti70 fixed angle Beckman rotor. The supernatant is removed and dialyzed overnight in a 10,000 Mr dialysis membrane against dialysis buffer (20 mM HEPES pH 7.5, 10% glycerol, 1 mM DTt, 1 mM EDTA, 100 mM NaCl, 10 mM MgSO₄, 10 mM CaCl₂, 1 mM benzamidine, and 1 mM PMSF). The dialyzed protein extract is removed from the dialysis tubing and frozen in one ml aliquots at −70° C.

[1087] An E. coli extract is prepared from cell pellets using a French press followed by sonication. An E. coli cell pellet (˜6 g) is suspended in 3 pellet volumes (˜20 ml final volume) of 20 mM HEPESpH 7.5, 150 mM NaCl, 10% glycerol, 10 mM MgSO₄, 10 mM CaCl₂, 1 mM DTT, 1 mM PMSF, 1 mM benzamidine, 40 μg/ml RNAse A, 75 units/ml S1 nuclease, and 40 units/ml DNAse 1. The cell suspension is lysed with one pass with a French Pressure Cell followed by sonication on ice using three bursts of 20 seconds each. The lysate is agitated at 4° C. for 30 minutes, brought up to 0.5 M NaCl and then incubated for an additional 30 min at 4° C. with agitation. The lysate is centrifuged at 25,000 rpm for 1 hr at 4° C. in a Ti70 fixed angle Beckman rotor. The supernatant is removed and dialyzed overnight in a 10,000 Mr dialysis membrane against dialysis buffer (20 mM HEPES pH 7.5, 10% glycerol, 1 mM DTT, 1 mM EDTA, 10 mM MgSO₄, 10 mM CaCl₂, 100 mM NaCl, 1 mM benzamidine, and 1 mM PMSF). The dialyzed protein extract is removed from the dialysis tubing and frozen in one ml aliquots at −70° C.

[1088] An H. pylori extract is prepared from cell pellets using a French press followed by sonication. An H. pylori cell pellet (˜6 g) is suspended in 3 pellet volumes (˜20 ml final volume) of 20 mM HEPES pH 7.5, 150 mM NaCl, 10% glycerol, 10 mM MgSO₄, 10 mM CaCl₂, 1 mM DTT, 1 mM PMSF, 1 mM benzamidine, 40 μg/ml RNAse A, 75 units/ml S1 nuclease, and 40 units/ml DNAse 1. The cell suspension is lysed with one pass with a French Pressure Cell followed by sonication on ice using three bursts of 20 seconds each. The lysate is agitated at 4° C. for 30 minutes, brought up to 0.5 M NaCl and then incubated for an additional 30 min at 4° C. with agitation. The lysate is centrifuged at 25,000 rpm for 1 hr at 4° C. in a Ti70 fixed angle Beckman rotor. The supernatant is removed and dialyzed overnight in a 10,000 Mr dialysis membrane against dialysis buffer (20 mM HEPES pH 7.5, 10% glycerol, 1 mM DTT, 1 mM EDTA, 100 mM NaCl, 10 mM MgSO₄, 10 mM CaCl₂, 1 mM benzamidine, and 1 mM PMSF). The dialyzed protein extract is removed from the dialysis tubing and frozen in one ml aliquots at −70° C.

[1089] A P. aeruginosa extract is prepared from cell pellets using a French press followed by sonication. An P. aeruginosa cell pellet (˜6 g) is suspended in 3 pellet volumes (˜20 ml final volume) of 20 mM HEPES pH 7.5, 150 mM NaCl, 10% glycerol, 10 mM MgSO₄, 10 mM CaCl₂, 1 mM DTT, 1 mM PMSF, 1 mM benzamidine, 40 μg/ml RNAse A, 75 units/ml S1 nuclease, and 40 units/ml DNAse 1. The cell suspension is lysed with one pass with a French Pressure Cell followed by sonication on ice using three bursts of 20 seconds each. The lysate is agitated at 4° C. for 30 minutes, brought up to 0.5 M NaCl and then incubated for an additional 30 min at 4° C. with agitation. The lysate is centrifuged at 25,000 rpm for 1 hr at 4° C. in a Ti7O fixed angle Beckman rotor. The supernatant is removed and dialyzed overnight in a 10,000 Mr dialysis membrane against dialysis buffer (20 mM HEPES pH 7.5, 10% glycerol, 1 mM DTT, 1 mM EDTA, 100 mM NaCl, 10 mM MgSO₄, 10 mM CaCl₂, 1 mM benzamidine, and 1 mM PMSF). The dialyzed protein extract is removed from the dialysis tubing and frozen in one ml aliquots at −70° C.

[1090] A S. pneumoniae extract is prepared from cell pellets using a French press followed by sonication. An S. pneumoniae cell pellet (˜6 g) is suspended in 3 pellet volumes (˜20 ml final volume) of 20 mM HEPES pH 7.5, 150 mM NaCl, 10% glycerol, 10 mM MgSO₄, 10 mM CaCl₂, 1 mM DTT, 1 mM PMSF, 1 mM benzamidine, 40 μg/ml RNAse A, 75 units/ml S1 nuclease, and 40 units/ml DNAse 1. The cell suspension is lysed with one pass with a French Pressure Cell followed by sonication on ice using three bursts of 20 seconds each. The lysate is agitated at 4° C. for 30 minutes, brought up to 0.5 M NaCl and then incubated for an additional 30 min at 4° C. with agitation. The lysate is centrifuged at 25,000 rpm for 1 hr at 4° C. in a Ti70 fixed angle Beckman rotor. The supernatant is removed and dialyzed overnight in a 10,000 Mr dialysis membrane against dialysis buffer (20 mM HEPES pH 7.5, 10% glycerol, 1 mM DTT, 1 mM EDTA, 100 mM NaCl, 10 mM MgSO₄, 10 mM CaCl₂, 1 mM benzamidine, and 1 mM PMSF). The dialyzed protein extract is removed from the dialysis tubing and frozen in one ml aliquots at −70° C.

[1091] An E. faecalis extract is prepared from cell pellets using a French press followed by sonication. An E. faecalis cell pellet (˜6 g) is suspended in 3 pellet volumes (˜20 ml final volume) of 20 mM HEPES pH 7.5, 150 mM NaCl, 10% glycerol, 10 mM MgSO₄, 10 mM CaCl₂, 1 mM DTT, 1 mM PMSF, 1 mM benzamidine, 40 μg/ml RNAse A, 75 units/ml S1 nuclease, and 40 units/ml DNAse 1. The cell suspension is lysed with one pass with a French Pressure Cell followed by sonication on ice using three bursts of 20 seconds each. The lysate is agitated at 4° C. for 30 minutes, brought up to 0.5 M NaCl and then incubated for an additional 30 min at 4° C. with agitation. The lysate is centrifuged at 20,000 rpm for 1 hr in a JA25.50 Beckman rotor. The supernatant is removed and dialyzed overnight in a 3,500 Mr dialysis membrane against dialysis buffer (20 mM HEPES pH 7.5, 10% glycerol, 1 mM DTT, 1 mM EDTA, 100 mM NaCl, 10 mM MgSO₄, 10 mM CaCl₂, 1 mM benzamidine, and 1 mM PMSF). The dialyzed protein extract is removed from the dialysis tubing and frozen in one ml aliquots at −70° C.

[1092] (d) Method Two for Bacterial Extract Preparation

[1093] Bacterial cell extracts from the pathogen of interest are prepared from cell pellets using a Bead-Beater apparatus (Bio-spec Products Inc.) and zirconia beads (0.1 mm diameter). The bacterial cell pellet is suspended (˜6 g) is suspended in 3 pellet volumes (˜20 ml final volume) of 20 mM HEPES pH 7.5, 150 mM NaCl, 10% glycerol, 10 mM MgSO₄, 10 mM CaCl₂, 1 mM DTT, 1 mM PMSF, 1 mM benzamidine, 40 μg/ml RNAse A, 75 units/ml S1 nuclease, and 40 units/ml DNAse 1. The cells are lysed with 10 pulses of 30 sec between 90 sec pauses at a temperature of −5 ° C. The lysate is separated from the zirconia beads using a standard column apparatus. The lysate is centrifuged at 20000 rpm (48000 x g) in a Beckman JA25.50 rotor. The supernatant is removed and dialyzed overnight at 4 ° C. against dialysis buffer (20 mM HEPES pH 7.5, 10% glycerol, 1 mM DTT, 1 mM EDTA, 100 mM NaCl, 10 mM MgSO₄, 10 mM CaCl₂, 1 mM benzamidine, and 1 mM PMSF). The dialyzed protein extract is removed from the dialysis tubing and frozen in one ml aliquots at −70° C.

[1094] (e) HeLa Cell Extract Preparation

[1095] A HeLa cell extract is prepared in the presence of protease inhibitors. Approximately 30 g of Hela cells are submitted to a freeze/thaw cycle and then divided into two tubes. To each tube 20 ml of Buffer A (10 mM HEPES pH 7.9, 1.5 mM MgCl, 10 mM KCl, 0.5 mM DTT, 0.5 mM PMSF) and a protease inhibitor cocktail are added. The cell suspension is homogenized with 10 strokes (2×5 strokes) to lyse the cells. Buffer B (15 ml per tube) is added (50 mM HEPES pH 7.9, 1.5 mM MgCl, 1.26 M NaCl, 0.5 mM DTT, 0.5 mM PMSF, 0.5 mM EDTA, 75% glycerol) to each tube followed by a second round of homogenization (2×5 strokes). The lysates are stirred on ice for 30 minutes followed by centrifugation 37,000 rpm for 3 hr at 4° C. in a Ti70 fixed angle Beckman rotor. The supernatant is removed and dialyzed overnight in a 10,000 Mr dialysis membrane against dialysis buffer (20 mM HEPES pH 7.9, 10% glycerol, 1 mM DTT, 1 mM EDTA, and 1 M NaCl. The dialyzed protein extract is removed from the dialysis tubing and frozen in one ml aliquots at −70° C.

[1096] (f) Affinity Chromatography

[1097] Cell extract is thawed and diluted to 5 mg/ml prior to loading 5 column volumes onto each micro-column. Each column is washed with 5 column volumes of 0.1 M ACB. This washing is repeated once. Each column is then washed with 5 column volumes of 0.1 M ACB containing 0.1% Triton X-100. The columns are eluted with 4 column volumes of 1% sodium dodecyl sulfate into a 96 well PCR plate. To each eluted fraction is added one-tenth volume of 10-fold concentrated loading buffer for SDS-PAGE.

[1098] (g) Resolution of the Eluted Proteins and Detection of Bound Proteins

[1099] The components of the eluted samples are resolved on SDS-polyacrylamide gels containing 13.8% polyacrylamide using the Laemmli buffer system and stained with silver nitrate. The bands containing the interacting protein are excised with a clean scalpel. The gel volume is kept to a minimum by cutting as close to the band as possible. The gel slice is placed into one well of a low protein binding, 96-well round-bottom plate. To the gel slices is added 20 μl of 1% acetic acid.

### EXAMPLE 12

### Method Two for Isolating and Identifying Interacting Proteins

[1100] Interacting proteins may be isolated using immunoprecipitation. Naturally-occurring bacterial or eukaryotic cells are grown in defined growth conditions or the cells can be genetically manipulated with a protein expression vector. The protein expression vector is used to transiently transfect the cDNA of interest into eukaryotic or prokaryotic cells and the protein is expressed for up to 24 or 48 hours. The cells are harvested and washed three times in sterile 20 mM HEPES (pH7.4)/Hanks balanced salts solution (H/H). The cells are finally resuspended in culture media and incubated at 37° C. for 4-8 hr.

[1101] The harvested cells may be subjected to one or more culture conditions that may alter the protein profile of the cells for a given period of time. The cells are collected and washed with ice-cold H/H that includes 10 mM sodium pyrophosphate, 10 mM sodium fluoride, 10 mM EDTA, and 1 mM sodium orthovanadate. The cells are then lysed in lysis buffer (50 mM Tris-HCl (pH 8.0), 150 mM NaCl, 1% Triton X-100, 10 mM sodium pyrophosphate, 10 mM sodium fluoride, 10 mM EDTA, 1 mM sodium orthovanadate, 1 μg/mL PMSF, 1 μg/mL aprotinin, 1 μg/mL leupeptin, and 1 μg/mL pepstatin A) by gentle mixing, and placed on ice for 5 minutes. After lysis, the lysate is transferred to centrifuge tubes and centrifuged in an ultracentrifuge at 75000 rpm for 15 min at 4° C. The supernatant is transferred to eppendorf tubes and pre-cleared with 10 μl of rabbit pre-immune antibody on a rotator at 4° C. for 1 hr. Forty μl of protein A-Sepharose (Amersham) is then added and incubated at 4° C. overnight on a rotator.

[1102] The protein A-Sepharose beads are harvested and the supernatant removed to a fresh eppendorf tube. Immune antibody is added to supernatant and rotated for 1 hr at 4° C. Thirty μl of protein A-Sepharose is then added and the mixture is further rotated at 4° C. for 1 hr. The beads are harvested and the supernatant is aspirated. The beads are washed three times with 50 mM Tris (pH 8.0), 150 mM NaCl, 0.1% Triton X-100, 10 mM sodium fluoride, 10 mM sodium pyrophosphate, 10 mM sodium orthovanadate, and 10 mM EDTA. Dry the beads with a 50 μl Hamilton syringe. Laemmli loading buffer containing 100 mM DTT is added to the beads and samples are boiled for 5 min. The beads are spun down and the supernatant is loaded onto SDS-PAGE gels. Comparison of the control and experimental samples allows for the selection of polypeptides that interact with the protein of interest.

### EXAMPLE 13

### Sample for Mass Spectrometry of Interacting Proteins

[1103] The gel slices are cut into 1 mm cubes and 10 to 20 μl of 1% acetic acid is added. The gel particles are washed with 100-150 μl of HPLC grade water (5 minutes with occasional mixing), briefly centrifuged, and the liquid is removed. Acetonitrile (˜200 μl, approximately 3 to 4 times the volume of the gel particles) is added followed by incubation at room temperature for 10 to 15 minutes with vortexing. A second acetonitrile wash may be required to completely dehydrate the gel particles. The sample is briefly centrifuged and all the liquid is removed.

[1104] The protein in the gel particles is reduced at 50 degrees Celsius using 10 mM dithiothreitol (in 100 mM ammonium bicarbonate) for 30 minutes and then alkylated at room temperature in the dark using 55 mM iodoacetamide (in 100 mM ammonium bicarbonate). The gel particles are rinsed with a minimal volume of 100 mM ammonium bicarbonate before a trypsin (50 mM ammonium bicarbonate, 5 mM CaCl₂, and 12.5 ng/μl trypsin) solution is added. The gel particles are left on ice for 30 to 45 minutes (after 20 minutes incubation more trypsin solution is added). The excess trypsin solution is removed and 10 to 15 μl digestion buffer without trypsin is added to ensure the gel particles remain hydrated during digestion. The samples are digested overnight at 37° C.

[1105] The following day, the supernatant is removed from the gel particles. The peptides are extracted from the gel particles with 2 changes of 100 μL of 100 mM ammonium bicarbonate with shaking for 45 minutes and pooled with the initial gel supernatant. The extracts are acidified to 1% (v/v) with 100% acetic acid.

[1106] (a) Method One for Purification of Tryptic Peptides

[1107] The tryptic peptides are purified with a C18 reverse phase resin. 250 μL of dry resin is washed twice with methanol and twice with 75% acetonitrile/1% acetic acid. A 5:1 slurry of solvent:resin is prepared with 75% acetonitrile/1% acetic acid. To the extracted peptides, 2 μL of the resin slurry is added and the solution is shaken at moderate speed for 30 minutes at room temperature. The supernatant is removed and replaced with 200 μL of 2% acetonitrile/1% acetic acid and shaken for 5-15 minutes with moderate speed. The supernatant is removed and the peptides are eluted from the resin with 15 μL of 75% acetonitrile/1% acetic acid with shaking for about 5 minutes. The peptide and slurry mixture is applied to a filter plate and centrifuged for 1-2 minutes at 1000 rpm, the filtrate is collected and stored at −70° C. until use.

[1108] (b) Method Two for Purification of Tryptic Peptides

[1109] Alternatively, the tryptic peptides may be purified using ZipTip_{C18} (Millipore, Cat #ZTC18S960). The ZipTips are first pre-wetted by aspirating and dispensing 100% methanol 5 times. The tips are then washed with 2% acetonitrile/1% acetic acid (5 times), followed by 65% acetonitrile/1% acetic (5 times) and returned to 2% acetonitrile/1% acetic acid (5 times). The ZipTips are replaced in their rack and the residual solvent is eliminated. The ZipTips are washed again with 2% acetonitrile/1% acetic acid (5 times). The digested peptides are bound to the ZipTips by aspirating and dispensing the samples 5 times. Salts are removed by washing ZipTips with 2% acetonitrile/1% acetic acid (5 times). 10 μL of 65% acetonitrile/1% acetic acid is collected by the ZipTips and dispensed into a 96-well microtitire plate. 1 μL of sample and 1 μL of matrix are spotted on a MALDI-TOF sample plate for analysis.

### EXAMPLE 14

### Mass Spectrometric Analysis of Interacting Proteins

[1110] (a) Method One for Analysis of Tryptic Peptides

[1111] Analytical samples containing tryptic peptides are subjected to Matrix Assisted Laser Desorption/Ionization Time Of Flight (MALDI-TOF) mass spectrometry. Samples are mixed 1:1 with a matrix of α-cyano-4-hydroxy-trans-cinnamic acid. The sample/matrix mixture is spotted on to the MALDI sample plate with a robot. The sample/matrix mixture is allowed to dry on the plate and is then introduced into the mass spectrometer. Analysis of the peptides in the mass spectrometer is conducted using both delayed extraction mode and an ion reflector to ensure high resolution of the peptides.

[1112] Internally-calibrated tryptic peptide masses are searched against both in-house proprietary and public databases using a correlative mass matching algorithm. Statistical analysis is performed on each protein match to determine its validity. Typical search constraints include error tolerances within 0.1 Da for monoisotopic peptide masses and carboxyamidomethylation of cysteines. Identified proteins are stored automatically in a relational database with software links to SDS-PAGE images and ligand sequences.

[1113] (b) Method Two for Analysis of Tryptic Peptides

[1114] Alternatively, samples containing tryptic peptides are analyzed with an ion trap instrument. The peptide extracts are first dried down to approximately 1 μL of liquid. To this, 0.1% trifluoroacetic acid (TFA) is added to make a total volume of approximately 5 μL. Approximately 1-2 μL of sample are injected onto a capillary column (C8, 150 μm ID, 15 cm long) and run at a flow rate of 800 nL/min. using the following gradient program:

| Time (minutes) | % Solvent A | % Solvent B |
|---|---|---|
| 0 | 95 | 5 |
| 30 | 65 | 35 |
| 40 | 20 | 80 |
| 41 | 95 | 5 |

[1115] Where Solvent A is composed of water/0.5% acetic acid and Solvent B is acetonitrile/0.5% acetic acid. The majority of the peptides will elute between the 20-40% acetonitrile gradient. Two types of data from the eluting HPLC peaks are acquired with the ion trap mass spectrometer. In the MS¹ dimension, the mass to charge range for scanning is set at 400-1400—this will determine the parent ion spectrum. Secondly, the instrument has MS² capabilities whereby it will acquire fragmentation spectra of any parent ions whose intensities are detected to be greater than a predetermined threshold (Mann and Wilm, Anal Chem 66(24): 4390-4399 (1994)). A significant amount of information is collected for each protein sample as both a parent ion spectrum and many daughter ion spectra are generated with this instrumentation.

[1116] All resulting mass spectra are submitted to a database search algorithm for protein identification. A correlative mass algorithm is utilized along with a statistical verification of each match to identify a protein's identification (Ducret A, et al., Protein Sci 7(3): 706-719 (1998)). This method proves much more robust than MALDI-TOF mass spectrometry for identifying the components of complex mixtures of proteins.

[1117] The results of the interaction studies for certain of the subject polypeptides are set forth in the applicable Table contained in the Figures.

### EXAMPLE 15

### NMR Analysis

[1118] Purified protein sample is centrifuged at 13,000 rpm for 10 minutes with a bench-top microcentrifuge to eliminate any precipitated protein. The supernatant is then transferred into a clean tube and the sample volume is measured. If the sample volume is less than 450 μl, an appropriate amount of crystal buffer is added to the sample to reach that volume. Then 50 μl of D₂O (99.9%) is added to the sample to make an NMR sample of 500 μl. The usual concentration of the protein sample is usually approximately 1 mmol or greater.

[1119] NMR screening experiments are performed on a Bruker AV600 spectrometer equipped with a cryoprobe, or other equivalent instrumentation. All spectra are recorded at 25° C. Standard ID proton pulse sequence with presaturation is used for ID screening. Normally, a sweepwidth of 6400 Hz, and eight or sixteen scans are used, although different pulse sequences are known to those of skill in the art and may be readily determined. For ¹H, ¹⁵N HSQC experiments, a pulse sequence with “flip-back” water suppression may be used. Typically, sweepwidths of 8000 Hz and 2000 Hz are used for F2 and F1 dimension, respectively. Four to sixteen scans are normally adequate. The data is then processed on a Sun Ultra 5 computer with NMRpipe software.

[1120] One or more representative NMR spectra from a ¹H, ¹⁵N HSQC experiment generated with certain polypeptides of the invention, prepared and purified as described above, are presented in the Figures.

### EXAMPLE 16

### X-Ray Crystallography

[1121] (a) Crystallization

[1122] Subsequent to purification, a subject polypeptide is centrifuged for 10 minutes at 4° C. and at 14,000 rpm in order to sediment any aggregated protein. The protein sample is then diluted in order to provide multiple concentrations for screening.

[1123] Two 96 well plates (Nunc) are employed for the initial crystal screen, with 48 potential crystallization conditions. The screening library has crystallization conditions found in Hampton Research Crystal Screen I (Jankarik, J. and S. H. Kim, J. Appl. Cryst., 1991. 24:409-11), Hampton Research Crystal Screen II, Hampton Crystal Screen I-Lite, and from Emerald Biostructures, Inc., Bainbridge Island, Wash., Wizard I, Wizard II, Cryo I and Cryo II. Alternatively, other conditions known to those of skill in the art, including those provided in screening kits available from other companies, may also be tested.

[1124] Conditions are tested at multiple protein concentrations and at two temperatures (4 and 20° C.). Crystal setups may be performed by a liquid handling robot appropriately programmed for sitting drop experiments. The robot loads 50 μl of buffer into each screening well on a 24 or 96 well sitting drop crystal screen tray, and then loads 1-5 μl of protein into each drop reservoir to be screened on the plate. Subsequently, the robot loads 1.5 μl of the corresponding screening solution into the drop reservoir atop the protein. The plate is then sealed using transparent tape, and stored at 4 or 20° C. Each plate is observed two days, two weeks, and 1 month after being set. Alternatively, screens may be performed using 0.1-10 μl drops suspended at the interface of two immiscible oils. The protein containing solution has a density intermediate between the two oils and thus floats between them (Chayen N. E.: 1996, Protein Eng. 9:927-29). This procedure may be performed in an automated fashion by an appropriately programmed liquid handling robot, with additional steps being required initially to introduce the oils. No tape is added to facilitate gradual drying out of the drop to promote crystallization.

[1125] Having identified conditions that are best suited for further crystal refinement, subsequent plates are set up to explore the affects of variables such as temperature, pH, salt or PEG concentration on crystal size and form, with the intent of establishing conditions where the protein is able to form crystals of suitable size and morphology for diffraction analysis. Each refinement is performed in the sitting drop format in a 24 well Lindbro plate. Each well in the tray contains 500 μl of screening solution, and a 1.5 μl drop of protein diluted with 1.5 μl of the screening solution is set to hang from the siliconized glass cover slip covering the well. Alternatively, refinement steps may be performed using either the machine 96 well plate hanging drop method or the oil suspension method described above.

[1126] Crystallization results for one or more polypeptides of the invention are set forth in the applicable Table contained in the Figures.

[1127] (b) Co-Crystallization

[1128] A variety of methods known in the art may be used for preparation of co-crystals comprising the subject polypeptides and one or more compounds that interact with the subject polypeptides, such as, for example, an inhibitor, co-factor, substrate, polynucleotide, polypeptide, and/or other molecule. In one exemplary method, crystals of the subject polypeptide may be soaked, for an appropriate period of time, in a solution containing a compound that interacts with a subject polypeptide. In another method, solutions of the subject polypeptide and/or compound that interacts with the subject polypeptide may be prepared for crystallization as described above and mixed into the above-described sitting drops. In certain embodiments, the molecule to be co-crystallized with the subject polypeptide may be present in the buffer in the sitting drop prior to addition of the solution comprising the subject polypeptide. In other embodiments, the subject polypeptide may be mixed with another molecule before adding the mixture to the sitting drop. Based on the teachings herein, one of skill in the art may determine the co-crystallization method yielding a co-crystal comprising the subject polypeptide.

[1129] (c) Heavy Atom Substitution

[1130] For preparation of crystals containing heavy atoms, crystals of the subject polypeptide may be soaked in a solution of a compound containing the appropriate heavy atom for such period as time as may be experimentally determined is necessary to obtain a useful heavy atom derivative for x-ray purposes. Likewise, for other compounds that may be of interest, including, for example, inhibitors or other molecules that interact with the subject polypeptide, crystals of the subject polypeptide may be soaked in a solution of such compound for an appropriate period of time.

[1131] (d) Data Collection and Processing

[1132] Before data collection may commence, a protein crystal is frozen to protect it from radiation damage. This is accomplished by suspending the crystal in a loop (purchased from Hampton Research) in a stream of dry nitrogen gas at approximately 100 K. The crystals are protected from damage caused by formation of ice crystals (within the lattice or in the liquid surrounding the crystal) upon freezing by supplementing the crystal growth solution with the appropriate cryo-protecting chemical. In some instances, crystals will grow in conditions that provide good cryo-protection, allowing the crystals to be frozen without further modification. In other instances, cryo-protection is achieved by supplementing the crystal growth solution with one or more of the following: 30% volume/volume MPD; 1.2M Na citrate; 30% PEG 400; 4.0M Na Formate; 15% glycerol; 15% ethylene glycol. Alternatively, data may be collected from crystals placed in a thin walled glass capillary and sealed at both ends to protect the crystal from dehydration.

[1133] In some cases, data collection is done at the Com-CAT beam-line at the Advanced Photon Source, using a charged coupled device detector. The oscillation method is used. Data is collected for three different wavelengths corresponding to the maximum of anomalous scattering for the appropriate heavy atom, such as selenium, the inflection point and a high energy remote wavelength. Alternatively, data may be collected at only one wavelength corresponding to the maximum of anomalous scattering, with data being collected over a larger range of oscillation angles.

[1134] In other cases, data collection is performed in house using a Bruker AXS Proteum R diffractometer. This machine includes a copper rotating anode, Osmic confocal focusing optics and a charge coupled device detector. This data is collected using Cu K_{α} radiation with a wavelength of 1.54 Å, using the oscillation method.

[1135] In some instances, data processing is done using the program HKL2000 and data scaling in Scalepack (Z. Otwinowski and W. Minor, Methods in Enzymology vol. 276 p307-326, Academic press). Or, as an alternative, data processing is done using the program Mosfilm and scaling in Scala (Diederichs, K. & Karplus, P. A., Nature Structural Biology, 4, 269-275, 1997).

[1136] After scaling, a computer file is obtained which contains the space group, unit cell parameters, and the index, intensity and sigma value for each reflection unique symmetrically. This information forms the raw input of structure determination.

[1137] (e) Heavy Atom Substructure, Phasing.

[1138] Anomalous scattering sites are found using automated anomalous difference Patterson methods in the program CNX (Brünger A T, Adams P D, Clore G M, DeLano W L, Gros P, Grosse-Kunstleve R W, Jiang J S, Kuszewski J, Nilges M, Pannu N S, Read R J, Rice L M, Simonson T, Warren G L. Acta Crystallogr. D 1998 54 pp 905-21). Alternatively, anomalous scattering sites are found using by real/reciprocal space cycling searches as implemented in shake-and-bake (Weeks C M, DeTitta G T, Hauptman H A, Thuman P, Miller R Acta Crystallogr A 1994; V50: 210-20).

[1139] Heavy atom substructure refinement, phase calculation and map calculation are performed in CNX (Brünger A T, et. al. Acta Crystallogr. D 1998 54 pp 905-21), as are density modification (including solvent flipping and non-crystallographic symmetry averaging). In some instances density modification is performed in programs of the CCP4 suite including DM (Collaborative Computational Project, Number 4. 1994. Acta Cryst. D50, 760-763).

[1140] The initial protein model may be built in the program TURBO or O. In this process, the crystallographer displays the electron density map on a graphics terminal and interprets the observed density in terms of amino acid residues in the appropriate sequence. Alternatively, QUANTA may be used, which provides an environment for semi-automated model building (Oldfield, T J. Acta Crystallogr D 2001; 57:82-94).

[1141] In certain circumstances, the electron density is fully and automatically interpreted in terms of a polypeptide chain using MAID (Levitt, D. G., Acta Crystallogr D 2001 V57:1013-9) or wARP (Perrakis, A., Morris, M. & Lamzin, V. S.; Nature Structural Biology, 1999 V6: 458-463).

[1142] (f) Molecular Replacement

[1143] In cases where an atomic model sufficiently similar to the structure in question is available, structure solution may proceed by molecular replacement (Rossmann M. G., Acta Crystallogr. A 1990; V46: 73-82). An appropriate search model is identified on the basis of sequence similarity to a suitable target molecule for which a known structure exists in the RCSB protein structure database (http://www.rcsb.org/pdb) or some other (potentially proprietary) database. Alternatively, the molecular replacement solution may be found using genetic algorithms that simultaneously search rotation and translation space, as is done by EPMR (Kissinger C R, Gehlhaar D K, Fogel D B. Acta Crystallogr D 1999; 55: 484-491). The appropriately positioned model may then be refined using rigid body refinement techniques in CNX. This model is then used to calculate model phases, which after solvent flipping in CNX, is used to calculate a map. This map is then used to rebuild the model to better reflect the electron density.

[1144] (g) Structure Refinement

[1145] The atomic model built by the crystallographer may be used, via theoretical models of how atoms scatter x-rays, to predict the diffraction intensities such a molecule would produce. These predictions can then be compared to the experimentally observed data, allowing the calculation of goodness of fit statistics such as the R-factor. Another important statistic is the R-free, a cross-correlated R-factor calculated using data that has been excluded from model refinement from the beginning. This statistic is free of model bias and can be used, for example, as an objective judge as whether the introduction of extra degrees of freedom into the model is justified (Brunger A T, Clore G M, Gronenborn A M, Saffrich R, Nilges M. Science 1993;261: 328-31). The model was then iteratively perturbed computationally to maximize the probability that the observed data was produced by the model, as well as to optimize model geometry (as embodied in an energy term) in the process known as refinement. Pragmatically, in order to maximize the computational efficiency convergence radius of refinement, simulated annealing refinement using torsion angle dynamics (in order to reduce the degrees of freedom of motion of the model) (Adams P D, Pannu N S, Read R J, Brunger A T, Acta Crystallogr. D 1999; V55: 181-90). Alternatively, refinement may be performed in the CCP4 program REFMAC, which uses similar procedures (Murshudov, G. N., Vagin, A. A. & Dodson, E. J. (1997). Acta Cryst. D53, 240-253).

[1146] Experimental phase information from a MAD experiment may be collected and may be utilized as an additional restraint in the refinement as Hendrickson-Lattman phase probability targets. Individual or group temperature factor refinements may also be performed in CNX.

[1147] Automatic water picking routines (implemented in the same package) may be employed to find well ordered solvent molecules, the inclusion of which is justified by a reduction in R-free.

### EXAMPLE 17

### Annotations

[1148] The functional annotation for each of the subject amino acid sequences (predicted) is arrived at by comparing the amino acid sequence of the ORF against all available ORFs in the NCBI database using BLAST. The closest match is selected to provide the probable function of each of the subject amino acid sequences (predicted). Results of this comparison are described above and set forth in the applicable Table contained in the Figures.

[1149] The COGs database (Tatusov R L, Koonin E V, Lipman D J. Science 1997; 278 (5338) 631-37) classifies proteins encoded in twenty-one completed genomes on the basis of sequence similarity. Members of the same Cluster of Orthologous Group, (“COG”), are expected to have the same or similar domain architecture and the same or substantially similar biological activity. The database may be used to predict the function of uncharacterised proteins through their homology to characterized proteins. The COGs database may be searched from NCBI's website (http:www.ncbi.nlm.nih.gov/COG/) to determine functional annotation descriptions, such as “information storage and processing” (translation, ribosomal structure and biogenesis, transcription, DNA replication, recombination and repair); “cellular processes” (cell division and chromosome partitioning, post-translational modification, protein turnover, chaperones, cell envelope biogenesis, outer membrane, cell motility and secretion, inorganic ion transport and metabolism, signal transduction mechanisms); or “metabolism” (energy production and conversion, carbohydrate transport and metabolism, amino acid transport and metabolism, nucleotide transport and metabolism, coenzyme metabolism, lipid metabolism). For certain polypeptides, there is no entry available. Results of this analysis are described above and set forth in the applicable Table contained in the Figures.

### EXAMPLE 18

### Essential Gene Analysis

[1150] Each of the subject amino acid sequences (predicted) is compared to a number of publicly available “essential genes” lists to determine whether that protein is encoded by an essential gene. An example of such a list is descended from a free release at the www.shigen.nig.ac.jp PEC (profiling of E. coli chromosome) site, http://www.shigen.nig.ac.jp/ecoli/pec/. The list is prepared as follows: a wildcard search for all genes in class “essential” yields the list of essential E. coli proteins encoded by essential genes, which number 230. These 230 hits are pruned by comparing against an NCBI E. coli genome. Only 216 of the 230 genes on the list are found in the NCBI genome. These 216 are termed the essential-216-ecoli list. The essential-216-ecoli list is used to garner “essential” genes lists for other microbial genomes by blasting. For instance, formatting the 216-ecoli as a BLAST database, then BLASTing a genome (e.g. S. aureus) against it, elucidates all S. aureus genes with significant homology to a gene in the 216-essential list. Each of the subject amino acid sequences (predicted) is compared against the appropriate list and a match with a score of e⁻²⁵ or better is considered an essential gene according to that list. In addition to the list described above, other lists of essential genes are publicly available or may be determined by methods disclosed publicly, and such lists and methods are considered in deciding whether a gene is essential. See, for example, Thanassi et al., Nucleic Acids Res 2002 July 15;30(14):3152-62; Forsyth et al., Mol Microbiol 2002 March;43(6):1387-400; Ji et al., Science 2001 September 21;293(5538):2266-9; Sassetti et al., Proc Natl Acad Sci U S A 2001 October 23;98(22):12712-7; Reich et al., J Bacteriol 1999 August;181(16):4961-8; Akerley et al., Proc Natl Acad Sci U S A 2002 January 22;99(2):966-71). Also, other methods are known in the art for determining whether a gene is essential, such as that disclosed in U.S. patent application Ser. No. 10/202,442 (filed Jul. 24, 2002). The conclusion as to whether the gene encoding a subject amino acid sequence (predicted) is essential is set forth in the applicable Table contained in the Figures.

### EXAMPLE 19

### PDB Analysis

[1151] Each of the subject amino acid sequences is compared against the amino acid sequences in a database of proteins whose structures have been solved and released to the PDB (protein data bank). The identity/information about the top PDB homolog (most similar “hit”, if any; a PDB entry is only considered a hit if the score is e⁻⁴ or better) is annotated, and the percent similarity and identity between a subject amino acid sequence (predicted) and the closest hit is calculated, with both being indicated in the applicable Table contained in the Figures.

### EXAMPLE 20

### Virtual Genome Analysis

[1152] VGDB or VG is a queryable collection of microbial genome databases annotated with biophysical and protein information. The organisms present in VG include:

| | | | | Genome |
|---|---|---|---|---|
| File | GRAM | Species | Source | file date |
| ecoli.faa | G− | Escherichia | NCBI | Nov. 18, 1998 |
| | | coli | | |
| hpyl.faa | G− | Helicobacter | NCBI | Apr. 19, 1999 |
| | | pylori | | |
| paer.faa | G− | Pseudomonas | NCBI | Sep. 22, 2000 |
| | | aeruginosa | | |
| ctra.faa | G− | Chlamydia | NCBI | Dec. 22, 1999 |
| | | trachomatis | | |
| hinf.faa | G− | Haemophilus | NCBI | Nov. 26, 1999 |
| | | influenzae | | |
| nmen.faa | G− | Neisseria | NCBI | Dec. 28, 2000 |
| | | meningitidis | | |
| rpxx.faa | G− | Rickettsia | NCBI | Dec. 22, 1999 |
| | | prowazekii | | |
| bbur.faa | G− | Borrelia | NCBI | Nov. 11, 1998 |
| | | burgdorferi | | |
| bsub.faa | G+ | Bacillus | NCBI | Dec. 1, 1999 |
| | | subtilis | | |
| staph.faa | G+ | Staphylococcus | TIGR | Mar. 8, 2001 |
| | | aureus | | |
| spne.faa | G+ | Streptococcus | TIGR | Feb. 22, 2001 |
| | | pneumoniae | | |
| mgen.faa | G+ | Mycoplasma | NCBI | Nov. 23, 1999 |
| | | genitalium | | |
| efae.faa | G+ | Enterococcus | TIGR | Mar. 8, 2001 |
| | | faecalis | | |

[1153] The VGDB comprises 13 microbial genomes, annotated with biophysical information (pI, MW, etc), and a wealth of other information. These 13 organism genomes are stored in a single flatfile (the VGDB) against which PSI-blast queries can be done.

[1154] Each of the subject amino acid sequences (predicted) is queried against the VGDB to determine whether this sequence is found, conserved, in many microbial genomes. There are certain criteria that must be met for a positive hit to be returned (beyond the criteria inherent in a basic PSI-blast). When an ORF is queried it may have a maximum of 13 VG-organism hits. A hit is classified as such as long as it matches the following criteria: Minimum Length (as percentage of query length): 75 (Ensure hit protein is at least 75% as long as query); Maximum Length (as percentage of query length): 125 (Ensure hit protein is no more than 125% as long as query); eVal:-10 (Ensure hit has an e-Value of e-10 or better); Id %:>:25 (Ensure hit protein has at least 25% identity to query). The e-Value is a standard parameter of BLAST sequence comparisons, and represents a measure of the similarity between two sequences based on the likelihood that any similarities between the two sequences could have occurred by random chance alone. The lower the e-Value, the less likely that the similarities could have occurred randomly and, generally, the more similar the two sequences are. The organisms having positive hits based on the foregoing for each of the subject amino acid sequences (predicted) are listed in the applicable Table contained in the Figures.

### EXAMPLE 21

### Epitopic Regions

[1155] The three most likely epitopic regions of each of the subject amino acid sequences (predicted) are predicted using the semi-empirical method of Kolaskar and Tongaonkar (FEBS Letters 1990 v276 172-174), the software package called Protean (DNASTAR), or MacVectors's Protein analysis tools (Accerlyrs). The antigenic propensity of each amino acid is calculated by the ratio between frequency of occurrence of amino acids in 169 antigenic determinants experimentally determined and the calculated frequency of occurrence of amino acids at the surface of protein. The results of these bioinformatics analyses are presented in the applicable Table contained in the Figures.

Equivalents

[1156] The present invention provides among other things, proteins, protein structures and protein-protein interactions. While specific embodiments of the subject invention have been discussed, the above specification is illustrative and not restrictive. Many variations of the invention will become apparent to those skilled in the art upon review of this specification. The full scope of the invention should be determined by reference to the claims, along with their full scope of equivalents, and the specification, along with such variations.

[1157] All publications and patents mentioned herein, including those items listed below, are hereby incorporated by reference in their entirety as if each individual publication or patent was specifically and individually indicated to be incorporated by reference. In case of conflict, the present application, including any definitions herein, will control. To the extent that any U.S. Provisional Patent Applications to which this patent application claims priority incorporate by reference another U.S. Provisional Patent Application, such other U.S. Provisional Patent Application is not incorporated by reference herein unless this patent application expressly incorporates by reference, or claims priorty to, such other U.S. Provisional Patent Application.

[1158] Also incorporated by reference in their entirety are any polynucleotide and polypeptide sequences which reference an accession number correlating to an entry in a public database, such as those maintained by The Institute for Genomic Research (TIGR) (www.tigr.org) and/or the National Center for Biotechnology Information (NCBI) (www.ncbi.nlm.nih.gov).

[1159] Also incorporated by reference are the following: WO 00/45168, WO 00/79238, WO 00/77712, EP 1047108, EP 1047107, WO 00/72004, WO 00/73787, WO00/67017, WO 00/48004, WO 01/48209, WO 00/45168, WO 00/45164, U.S. Ser. No. 09/720272; PCT/CA99/00640; U.S. patent application Ser. No: 10/097125 (filed Mar. 12, 2002); Ser. No. 10/097193 (filed Mar. 12, 2002); Ser. No. 10/202442 (filed Jul. 24, 2002); Ser. No. 10/097194 (filed Mar. 12, 2002); Ser. No. 09/671817 (filed Sep. 17, 2000); Ser. No. 09/965654 (filed Sep. 27, 2001); Ser. No. 09/727812 (filed Nov. 30, 2000); 60/370667 (filed Apr. 8, 2002); a utility patent application entited “Methods and Apparatuses for Purification” (filed Sep. 18, 2002); U.S. Pat. Nos. 6,451,591; 6,254,833; 6,232,114; 6,229,603; 6,221,612; 6,214,563; 6,200,762; 6,171,780; 6,143,492; 6,124,128; 6,107,477; D,428,157; 6,063,338; 6,004,808; 5,985,214; 5,981,200; 5,928,888; 5,910,287; 6,248,550; 6,232,114; 6,229,603; 6,221,612; 6,214,563; 6,200,762; 6,197,928; 6,180,411; 6,171,780; 6,150,176; 6,140,132; 6,124,128; 6,107,066; 6,270,988; 6,077,707; 6,066,476; 6,063,338; 6,054,321; 6,054,271; 6,046,925; 6,031,094; 6,008,378; 5,998,204; 5,981,200; 5,955,604; 5,955,453; 5,948,906; 5,932,474; 5,925,558; 5,912,137; 5,910,287; 5,866,548; 6,214,602; 5,834,436; 5,777,079; 5,741,657; 5,693,521; 5,661,035; 5,625,048; 5,602,258; 5,552,555; 5,439,797; 5,374,710; 5,296,703; 5,283,433; 5,141,627; 5,134,232; 5,049,673; 4,806,604; 4,689,432; 4,603,209; 6,217,873; 6,174,530; 6,168,784; 6,271,037; 6,228,654; 6,184,344; 6,040,133; 5,910,437; 5,891,993; 5,854,389; 5,792,664; 6,248,558; 6,341,256; 5,854,922; and 5866343.

[1160] Onesti, S., (2000) Biochemistry 39:12853-12861; Fishman, R., et al. (2001) Acta Crystallographica D Biological Crystallography 57:1534-1544; Nakama, T., et al. (2001) Journal of Biological Chemistry 276:4738747393; Brown, M. J. B., et al. (2000) Biochemistry 39:6003-6011; Lee, J., et al (2001) Bioorganic & Medicinal Chemistry Letters 11:965-968; Xiang, Y. Y., (1999) Bioorganic & Medicinal Chemistry Letters 9:375-380; Ilyin, V. A., et al. (2000) Protein Science 9, 218-231; and Retailleau, P., et al. (2001) Acta Crystallographica D Biological Crystallography. 57, 1595-1608.

[1161] Briand, C., et al. (2000) Journal of Molecular Biology 299:1051-1060; Moulinier, L., et al. (2001) EMBO Journal 20:5290-5301; Eiler, S., et al. (1999) EMBO Journal 18:6532-6541; Schmitt, E., et al. (1998) EMBO Journal 17:5227-5237

[1162] Francklyn, C., et al. (1997) RNA. 3, 954-960; and Nakama, T., et al. (2001) Journal of Biological Chemistry 276, 47387-47393.

[1163] Luo, et al. (1997) J Bacteriol. 179:2472-2478 and Sankaranarayanan, R., et al. (1999) Cell 97:371-381

[1164] Guillon, et al. (1996) J Biol Chem 271:22321-5; Yusupova, et al. (1996) Biochemistry 35:2978-84; Landick, R., et al. (1996). Transcription attenuation in Escherichia coli and Salmonella, Neidhardt, ed, pp 1440-1445. American Society for Microbiology, Washington DC; Cummings et al., (1994) J Bacteriol. 1:198-205; Sette et al., (1997) EMBO J. 16:1436-1443; Dahlquist and Puglisis. (2000) J Mol Biol. 299:1-15; Carter et al., (2001) Science 291:498-501; Biou et al., (1995) EMBO J. 16: 4056-4064; Li and Hoffman (2001) Protein Sci, 12:2426-38; and Petrelli et al., (2001) EMBO J., 20: 4560-9.

[1165] Jackowski, S (1992); Lonsdale, et al, (2001) DDT 6, 537-544; Rock, C. & Cronan, J. (1996) Biochimica et Biophysica Acta 1302, 1-16; Tsay, et al. (1992) J Bacteriol 174:508-13; and Heath, et al, (1996) J. Biol. Chem. 271, 1833-1836.

[1166] Lowther et al., (1998). Proc. Natl. Acad. Sci. 95: 12153-12157; Lowther et al., (1999) Biochemistry 24:7678-7688; Lowther et al., (1999) Biochemistry 45: 14810-9; Chiu et al., (1999) J Bacteriol. 181: 4686-4689; Roderick et al., (1993) Biochemistry 32: 3907-3912; and Lowther and Matthews, (2000) Biochimica et Biophysica Acta 1477:157-167.

[1167] Munoz et al., (1997) Rev Latinoam Microbiol 39: 129-40; and Ponce et al., (1995) J Bacteriol 19: 5719-5722

[1168] U.S. Pat. No. 6,225,076; Darst et al., (2001) Cell 104: 901-912; Kuznedelov et al. (2002) Science 295:855-857; Darst et al., (1999) Cell 98:811-824; and Naryshkina et al., (2001) J. Biol. Chem. 276:13308-13313).

[1169] Sorensen, K. I. and Hove-Jensen, B. (1996) Journal of Bacteriology 178, 1003-1011; Sprenger, G. A. (1995) Archives of Microbiology 164, 324-330; and Kochetov, G. A. (2001) Biochemistry (Moscow) 66, 1077-1085.

[1170] Lambalot R H, Walsh C T, (1995) J Biol Chem 270(42): 24658-24661; Carreras C W, et al., (1997) Biochemistry 36(39): 11757-11761; and Parris K D, et al., (2000) Structure Fold Des 8(8): 883-895.

[1171] Doublet et al., (1993) J. Bacteriol. 175: 2970-2979; Doublet et al., (1992) J. Bacteriol. 174: 5772-5779; Doublet et al., (1994) Biochemistry 33:5285-5290; Hwang et al., (1999) Nat Struct Biol 5:422-66; Glavas and Tanner (1999) Biochemistry 13:4106-13; and Glavas and Tanner (2001) Biochemistry 21: 6199-6204.

[1172] Jordan, A.,et al. (1994) Proc.Natl.Acad.Sci.USA 91:12892-12896; Jordan, A., et al. (1996) Mol.Microbiol; and Sarel S, et al. J Med Chem. (1999) 42(2):242-8.

[1173] Adams et al. (1980) Annu. Rev. Biochem. 49: 1005-1061; Hayzer and Leisinger. (1982) Eu. J. Biochem. 121:561-565; Sleator et al., (2001) Applied Env. Mic. 67:2571-2577; and Limauro et al., (1996) Microbiology 11:3275-3282.

[1174] Albin, R. and P. M. Silverman (1984). Mol Gen Genet 197(2): 261-71; Aqvist, J. and M. Fothergill (1996). J Biol Chem 271(17): 10010-6; Burton, P. M. and S. G. Waley (1968). Biochim Biophys Acta 151(3): 714-5; Campbell, I. D., R. B. Jones, et al. (1979). Biochem J 179(3): 607-21; Delboni, L. F., S. C. Mande, et al. (1995). Protein Sci 4(12): 2594-604; Fenn, R. H. and G. E. Marshall (1972). Biochem J 130(1): 1-10; Garza-Ramos, G., N. Cabrera, et al. (1998). Eur J Biochem 253(3): 684-91; Gibson, D. R., R. W. Gracy, et al. (1980). J Biol Chem 255(19): 9369-74; Gomez-Puyou, A., E. Saavedra-Lira, et al. (1995). Chem Biol 2(12): 847-55; Hartman, F. C. (1968). Biochem Biophys Res Commun 33(6): 888-94; Hartman, F. C. (1970). Biochemistry 9(8): 1783-91; Hartman, F. C. (1970 Biochemistry 9(8): 1776-82; Hartman, F. C. (1971). Biochemistry 10(1): 146-54; Hartman, F. C., G. M. LaMuraglia, et al. (1975). Biochemistry 14(24): 5274-9; Hartman, F. C. and I. C. Norton (1977). Methods Enzymol 47: 479-98; Heinz, D. W., M. Ryan, et al. (1995). Embo J 14(16): 3855-63; Johnson, L. N. and R. Wolfenden (1970). J Mol Biol 47(1): 93-100; Jones, R. B. and S. G. Waley (1979). Biochem J 179(3): 623-30; Jones, A. R. and S. J. Cooney (1987). Biochem Biophys Res Commun 145(3): 1054-8; Jones, A. R. and L. M. Porter (1995). Reprod Fertil Dev 7(5): 1089-94; Joubert, F., A. W. Neitz, et al. (2001). Proteins 45(2): 13643; Krietsch, W. K., P. G. Pentchev, et al. (1970). Eur J Biochem 14(2): 289-300; Kursula, I., S. Partanen, et al. (2001). Eur J Biochem 268(19): 5189-96; Lolis, E. and G. A. Petsko (1990) Biochemistry 29(28): 6619-25; Marks, G. T., T. K. Harris, et al. (2001). Biochemistry 40(23): 6805-18; Mendz, G. L., S. L. Hazell, et al. (1994). Arch Biochem Biophys 312(2): 349-56; Nader, W., A. Betz, et al. (1979). Biochim Biophys Acta 571(2): 177-85; Niitsu, Y., 0. Hori, et al. (1999). Brain Res Mol Brain Res 74(1-2): 26-34; Noble, M. E., C. L. Verlinde, et al. (1991). J Med Chem 34(9): 2709-18; Noble, M. E., R. K. Wierenga, et al. (1991). Proteins 10(1): 50-69; Norton, I. L. and F. C. Hartman (1972). Biochemistry 11(24): 4435-41; O'Connell, E. L. and I. A. Rose (1977). Methods Enzymol 46: 381-8; Ostoa-Saloma, P., G. Garza-Ramos, et al. (1997). Eur J Biochem 244(3): 700-5; Rose, I. A. and E. L. O'Connell (1969). J Biol Chem 244(23): 6548-50; Saadat, D. and D. H. Harrison (2000). Biochemistry 39(11): 2950-60; Thomas, M. K. and T. G. Spring (1976). Biochem J 153(3): 741-4; Verlinde, C. L. M. J.; Rudenko, G.; Hol, W. G. J. J. Comput. Aided Mol. Design 6, 131 (1992); Gao, X.-G., et al. (1999) Proc. Natl. Acad. Sci. USA 96, 10062; Maldonado, E., et al. (1998) J. Mol. Biol. 283, 193; Raines, R. T., et al. (1986) Biochemistry 25, 7142-7154; Joseph-McCarthy, D. D., et al. (1994) Biochem. 33, 2815; Otwinowski, Z. and W. Minor (1997). Methods in Enzymology, vol. 276: Macromolecular Crystallography (Part A), p. 307-326, C. W. Carter, Jr. and R. M. Sweet, Eds., Academic Press; Brunger, A. T. et al. (1998) Acta Crystallogr. D. Biol. Crystallogr. 54, 905-921; Noble, M. E. M., et al, J. A. (1993) Acta Crystallogr D Biol Crystallogr 49 403; Velanker, S. S., S. S. Ray, et al. (1997). Structure 5(6): 751-61; Verlinde, C. L., C. J. Witmans, et al. (1992). Protein Sci 1(12): 1578-84; Verlinde, C. L., G. Rudenko, et al. (1992). J Comput Aided Mol Des 6(2): 131-47; Verlinde, C. L., E. A. Merritt, et al. (1994). Protein Sci 3(10): 1670-86; E.Lolis, G.A.Petsko. Biochem. 29, 6619 (1990); Waley, S. G., J. C. Miller, et al. (1970) Nature 227(254): 1811 and Zubillaga, R. A., R. Perez-Montfort, et al. (1994). Arch Biochem Biophys 313(2): 328-36.

[1175] Beaman et al., (2002) Protein Sci 4:97 4-979, Paiva et al., (2001) Biochim Biophys Acta 1-2: 67-77, Beaman et al., (1998) Biochemistry 29: 10363-10369, Beaman et al., (1997) Biochemistry 3:489-94, Simms et al., (1984) J Biol. Chem. 259: 2734-41, and Berges et al., (1986) J. Biol. Chem. 261:6160-7.

[1176] Plater, A.R. et al. (1999) J. Mol. Biol. 285, 843-855 and Blom, N.S. et al. (1996) Nat Struct Biol 3, 856-862.

[1177] Murzin A. G., et al. (1995). J. Mol. Biol. 247, 536-540; Orengo, C. A., et al. (1997) Structure. Vol 5. No 8. p.1093-1108; Pearl, F.M.G, et al. (2000) Nucleic Acids Research, Vol 28. No 1. 277-282; Kaneda K, et al. (2001) Proc Natl Acad Sci U S A, 98(3):932-7; Bonanno J B, et al. (2001) Proc Natl Acad Sci U S A. 98(23):12896-901; Wilding, E. I., et al., (2000) J. Bacteriol., 182, 4319-4327; Street, I. P. & Poulter, C. D. (1990) Biochemistry 29, 7531-7538; Leyes, A. E., et al. (1999) Chem. Commun., 717-718; M. Michael Grorniha, and S. Selvaraj (1997) J. Biol. Phys., 23:209-217; S. Selvaraj and M. Michael Gromiha (1998). J. Protein Chem., 17:407-415; S. Selvaraj and M. Michael Gromiha (1998) J. Protein Chem., 17:691-697; N. Kannan, et al. (2001). Proteins: Struct. Funct. Genetics (in press); Otwinowski, Z. and Minor, W. (1997) Methods Enzymol. 276, 307-326; and Brunger, A. T., et al. (1998) Acta Crystallogr. D. Biol. Crystallogr. 54, 905-921.

[1178] Bhuiya et al., (2002) Acta Crystallogr D Bio Crystallogr 58:1338-9; and Maurizi and Rasulova (2002) Arch Biochem Biophys 397:206-16).

[1179] Xu Z, Horwich A L, Sigler P B. (1997) Nature August 21;388(6644):741-50; Yamaguchi H, et al. (2000) Infect Immun June;68(6):3448-54; Perez-Perez G I, et al. (1994) Clin Diagn Lab Immunol May;1(3):325-9; and Ferrero RL, et al. (1995) Proc Natl Acad Sci U S A July 3;92(14):6499-503.

[1180] Fernandez-Moreira et al., (2000) Microb. Drug Resist. 4: 259-267; Qi et al., (2002) Proteins 3: 258-64; Peng and Marians. (1993) J Biol Chem. 32:24481-90; Morais Cabral et al., (1997) Nature 6645:903-906; and Lavasani and Hiasa. (2001) Biochemistry 29:8438-43).

[1181] Foor et al., (1975) J. Biol. Chem. 250:3545-3551; Schramek et al., (2001) J. Biol. Chem. 47: 44157-62; and Schramek et al., (2001) J. Biol. Chem. 25:22273-7.

[1182] Christiansena, I and Hengstenberg W. (1999) Microbiology 145: 2881-2889; Kravanja et al., (1999) Mol. Microbiol. 31(1): 59-66; Erni, B. (1992) Int Rev Cytol 137A, 127-148; Hengstenberg, W. et al. (1993). FEMS Microbiol Rev 12, 149-164; Postma, P. W., Lengeler, J. W. & Jacobson, G. R. (1993). Microbiol Rev 57, 543-594.; Lengeler, J. W., Jahreis, K. & Wehmeier, U. F. (1994). Biochim Biophys Acta 1188, 1-28; Groler A. et al. (1999) Appl. Magn. Reson. 17: 465-480; and Hahmann M. et al., (1998) Eur. J. Biochem. 252: 51-58.

[1183] Bartig, et al (1992) Eur. J. Biochem. 204, 751-758; Aoki H. et al (1997) Biochimie 79, 7-11; Deckert, G. (1998) Nature 392, 353-358); Deckert, G. (1998) Nature 392, 353-358; Fraser, C. et al (1997) Nature, 390, 580-586; Abratt, V et al (1998) Mol. Gen. Genet. 258, 363-372; Ramos, A. et al (1997) Gene 198, 217-222; Guerout-Fleury, A. et al (Sept. 1995) submitted to EMBL/GenBank/DDBJ databases, Kobayashi, Y. et al (May 1996) submitted to EMBL/GenBank/DDBJ databases; Aoki, H. et al (1991) Nucleic Acids Res 19, 6215-6220; Fleischmann, R. et al (1995) Science 269, 496-512; Alm, R. et al (1999) Nature 397, 176-180; Tomb J.-F. et al (1997) Nature 388, 539-547; Bolotin, A. et al (2001) Genome Res. 11, 731-753; Peterson, S. et al (1993) J. Bacteriol. 175, 7918-7930; Fraser, C. et al (1995) Science 270, 397403; Himmelreich, R. et al (1996) Nucleic Acids Res. 24, 4420-4449; Cole, S. et al (1998) Nature 393, 537-544; Fleischmann, R. et al (April 2001) submitted to EMBL/GenBank/DDBJ databases; May, B. et al (2001) Proc. Natl. Acad. Sci. USA 98, 3460-3465; Andersson, S. et al (1998) Nature 396, 133-140; Kuroda, M. et al (2001) Lancet 357, 1218-1219; Ferretti, J. et al (2001) Proc. Natl. Acad. Sci. USA 98, 4658-4663; Nelson, K. et al (1999) Nature 399, 323-329; Fraser, C. et al (1998) Science 281, 375-388; Glass, J. et al (2000) Nature 407, 757-762; Aoki, H. et al (1997) Biochimie 79, 7-11; Bartig, D. et al (1992) Eur. J. Biochem 204, 751-758; and Aoki, H. et al (1997) J. Biol. Chem. 272, 32254-32259.

[1184] Buchner, J. and Grallert, H. (2001) Journal of Structural Biology. 135: 95-103; Houry, W. A. (2001) Biochemistry and Cell Biology. 79: 569-577; and Ranson, N. A. et al. (2001) Cell. 107:869-879.

[1185] Richardson, J. P. et al. (1999) The Journal of Biological Chemistry. 274:5245-5251; von Hippel, P. H. and Pasman, Z. (2000) Biochemistry. 39:5573-5585; Richardson, J. P. et al. (1999) The Journal of Biological Chemistry. 274:5245-5251; and von Hippel, P. H. and Pasman, Z. (2000) Biochemistry. 39:5573-5585.

[1186] Reinstein, J. and Groemping, Y. (2001) Journal of Molecular Biology. 314:167-178; Christen, P. et al. (2001) Journal of Biological Chemistry. 276:6098-6104; Mehl, A. F. et al. (2001) Biochemical and Biophysical Research Communications 282:562-569; and Ben-Zvi, A. P. and Goloubinoff, P. (2001) Journal of Structural Biology. 135: 84-93.

[1187] Darst et al., Cell (1999) 98:811-824, and Darst et al., (2001) 104: 901-912.

[1188] Stryer, L. (1995) Biochemistry. 4th Ed. W. H. Freeman and Company, New York; Schatz, D. et al. (1991) Proceedings of the National Academy of Science. 88,:6132-6136; Hartlein, M. et al. (1994) Nucleic Acids Research. 22:2963-2969; and Kim, P. S. and Oakley, M. G. (1997) Biochemistry. 36:2544-2549; Hartlein, M. (1998) Biochimica et Biophysica Acta. 1397:169-174.

[1189] Beuning, P. J. (2001) J. Biol. Chem. 276:30779-30785. U.S. Pat. No. 6,228,588; Lauhon et al, (2000) J Biol Chem. 275:20096-20103; Zheng et al., (1998). J Biol Chem. 273: 13264-13272; Schwartz et al. (2000). PNAS 97:9009-9014; and Kurihara et al. (1997). J Biol Chem. 36:22417-22424.

[1190] Costerton, J. W., et al. (1995) Annu. Rev Microbiol. 49, 711-745; Costerton, J. W., et al., (1999) Science. 284, 1318-1322; Singh, P. K., et al., (2000) Nature 407, 762-764; Withers, H., et al. (2001) Cur. Opinion. Microbiol. 4, 186-193; Fuqua, C., et al. (1996) Annu. Rev. Microbiol 50, 727-751; Ochsner, U. A. and Reiser, J. (1995) Proc. Natl. Acad. Sci. 92, 6424-6428; Fuqua. C., Parsek, M. R., & Greenber, E. P. (2001) Annu. Rev.Genet. 35, 439-468; De Kievit, T. R., et al. (2001) Appl. Environ. Microbiol. 67: 1865-1873; Bassler, B. L. (1999) Cur. Opinion. Microbiol. 2, 582-587; and Yamamoto K, et al. (2001) Mol. Microbiol 41, 1187-1198.

[1191] Berry et al. (1998) Proteins 32:276-288; Perrier et al. (1998) J Biol Chem 273:19097:19101; Perrier et al. (1998) Protein Eng 10:917-923; and Berry et al. (1994) Proteins 3:183-198.

[1192] Olsen, L. R., et al. (2001) Acta Crystallographica. D57, 296-297; Mengin-Lecreulx, D. et al. (2001) The Journal of Biological Chemistry. 276, 3833-3839; Bourne, Y. et al. (2001) The Journal of Biological Chemistry. 276, 11844-11851; and Roderick, S. L. and Olsen, L. R. (2001) Biochemistry. 40, 1913-1921.

[1193] Fujisaki, S., et al. (1989) J Bacteriol, 171(10): 5654-8; Wang, C. W., et al. (1999) Biotechnol. Bioeng., 62(2): 235-41; Mac Siomoin, R. A., et al. (1996) Mol. Microbiol., 19(3): 599-609; Fujisaki, S., et al. (1990) J. Biochem. (Tokyo), 108(6): 995-1000; Tarshis, L. C. et al. (1996) Proc. Natl. Acad. Sci. U.S.A., 93: 15018-15023; Tarshis, L. C. et al. (1994) Biochemistry, 33: 10871-10877; Brems, D. N., et al. (1981) Biochemistry 20:3711-3718; and Ashby,M. N., and Edwards, P. A. (1992) J. Biol. Chem. 267:41284136.

[1194] Lonsdale, et al, (2001), DDT 6, 537-544; Rock, C. & Cronan, J. (1996) Biochimica et Bioplhysica Acta 1302, 1-16; Jackowski, S. (1992); and Heath, et al, (1996), J. Biol. Chem. 271, 1833-1836.

[1195] Erickson, H. K. 2000. Biochemistry. 39, 9241-9250; Hogenkamp, H. P. C. 1996. Biochemistry. 35, 4485-4491; and Erickson, H. K. 2001. Biochemistry. 40, 9631-9637.

The application's sequence listing, which the Patent Office published only in electronic form, follows.

SEQUENCE LISTING (901 sequences)

SEQ ID NO: 1 - protein, 20 aa, Artificial Sequence
  Description of Artificial Sequence: synthetic peptide
MGSSHHHHHHSSGLVPRGSH

SEQ ID NO: 2 - protein, 15 aa, Artificial Sequence
  Description of Artificial Sequence: synthetic peptide
GSENLYFQGHHHHHH

SEQ ID NO: 3 - protein, 8 aa, Artificial Sequence
  Description of Artificial Sequence: synthetic peptide
GSENLYFQ

SEQ ID NO: 4 - DNA, 1548 bp, Staphylococcus aureus
atgtttgagtgtaccagttggaatactaaaggattacaacaagttaaaggagagaaagttatgtcagaagaaatgaatgaccaaatgttggttcgacgtcaaaaattacaagaattatatgatcttggtatagacccgtttggttctaaatttgaccgttcaggtttatctagtgatttgaaagaagagtgggaccagtattctaaagaagaattggtagaaaaagaagcggatagtcatgtcgctatagctggacgattaatgactaagcgtggtaaaggtaaagcaggatttgcacacgttcaggacttagctggacaaattcaaatttacgttcgtaaagatcaagttggcgatgacgaatttgatttatggaaaaatgctgatttaggcgatatcgttggtgttgaaggtgtaatgttcaaaacaaatactggcgaattatcggttaaagcgaagaaattcacgctactaactaaatcattgcgaccattaccggataaattccacggtttacaggatattgaacagagatatcgtcaaagatatttagatttaattacgaacgaagatagcactcgtacatttattaatcgtagtaaaatcattcaagaaatgcgtaattatttaaataataaaggtttcttggaagtagaaacacctatgatgcaccaaattgctggtggagcagctgctagaccatttgtaacacatcataatgcattagatgcaacgttatacatgcgtattgctattgagttgcatttaaaacgtttaattgtcggtggacttgaaaaagtatatgaaattggtagagtattccgtaatgaaggtgtatcaactagacataaccctgaattcacaatgattgaattatatgaagcatatgcagattatcatgacattatggatttaacagaatctatggtgagacatattgccaatgaagtgttaggttctgcaaaagtacaatacaatggggaaacgattgatttagaatctgcttggactcgtttgcatattgttgatgctgtaaaagaagctactggtgtagatttttatgaagttaaaagtgatgaagaagctaaagctttagctaaagaacatggtattgaaattaaagatacaatgaaatatggtcatattttaaatgaattctttgagcaaaaagttgaagaaacacttattcagccaacgtttatctatggtcatccgactgaaatttcacctttagcgaagaaaaatcctgaagatcctagatttactgatcgtttcgaattgttcattgtaggtagagagcatgcaaatgcatttactgaattaaatgatcctattgatcaaaaaggtcgttttgaagcgcaacttgttgaaaaagcgcaaggtaatgatgaagcgcatgaaatggatgaagattacattgaagcgttagaatatggtatgcctccgacaggtggtcttggtatcggtattgacagattggttatgttattaactgactctccatcaatcagagacgtattattattcccttatatgagacaaaaataa

SEQ ID NO: 5 - protein, 515 aa, Staphylococcus aureus
MFECTSWNTKGLQQVKGEKVMSEEMNDQMLVRRQKLQELYDLGIDPFGSKFDRSGLSSDLKEEWDQYSKEELVEKEADSHVAIAGRLMTKRGKGKAGFAHVQDLAGQIQIYVRKDQVGDDEFDLWKNADLGDIVGVEGVMFKTNTGELSVKAKKFTLLTKSLRPLPDKFHGLQDIEQRYRQRYLDLITNEDSTRTFINRSKIIQEMRNYLNNKGFLEVETPMMHQIAGGAAARPFVTHHNALDATLYMRIAIELHLKRLIVGGLEKVYEIGRVFRNEGVSTRHNPEFTMIELYEAYADYHDIMDLTESMVRHIANEVLGSAKVQYNGETIDLESAWTRLHIVDAVKEATGVDFYEVKSDEEAKALAKEHGIEIKDTMKYGHILNEFFEQKVEETLIQPTFIYGHPTEISPLAKKNPEDPRFTDRFELFIVGREHANAFTELNDPIDQKGRFEAQLVEKAQGNDEAHEMDEDYIEALEYGMPPTGGLGIGIDRLVMLLTDSPSIRDVLLFPYMRQK

SEQ ID NO: 6 - DNA, 1548 bp, Staphylococcus aureus
atgtttgagtgtaccagttggaatactaaaggattacaacaagttaaaggagagaaagttatgtcagaagaaatgaatgaccaaatgttggttcgacgtcaaaaattacaagaattatatgatcttggtatagacccgtttggttctaaatttgaccgttcaggtttatctagtgatttgaaagaagagtgggaccagtattctaaagaagaattggtagaaaaagaagcggatagtcatgtcgctatagctggacgattaatgactaagcgtggtaaaggtaaagcaggatttgcacacgttcaggacttagctggacaaattcaaatttacgttcgtaaagatcaagttggcgatgacgaatttgatttatggaaaaatgctgatttaggcgatatcgttggtgttgaaggtgtaatgttcaaaacaaatactggcgaattatcgggtaaagcgaagaaattcacgctactaactaaatcattgcgaccattaccggataaattccacggtttacaggatattgaacagagatatcgtcaaagatatttagatttaattacgaacgaagatagcactcgtacatttattaatcgtagtaaaatcattcaagaaatgcgtaattatttaaataataaaggtttcttggaagtagaaacacctatgatgcaccaaattgctggtggagcagctgctagaccatttgtaacacatcataatgcattagatgcaacgttatacatgcgtattgctattgagttgcatttaaaacgtttaattgtcggtggacttgaaaaagtatatgaaattggtagagtattccgtaatgaaggtgtatcaactagacataaccctgaattcacaatgattgaattatatgaagcatatgcagattatcatgacattatggatttaacagaatctatggtgagacatattgccaatgaagtgttaggttctgcaaaagtacaatacaatggggaaacgattgatttagaatctgcttggactcgtttgcatattgttgatgttgtaaaagaagctactggtgtagatttttatgaagttaaaagtgatgaagaagctaaagctttagctaaagaacatggtattgaaattaaagatacaatgaaatatggtcatattttaaatgaattctttgagcaaaaagttgaagaaacacttattcagccaacgtttatctatggtcatccgactgaaatttcacctttagcgaagaaaaatcctgaagatcctagatttactgatcgtttcgaattgttcattgtaggtagagagcatgcaaatgcatttactgaattaaatgatcctattgatcaaaaaggtcgttttgaagcgcaacttgttgaaaaagcgcaaggtaatgatgaagcgcatgaaatggatgaagattacattgaagcgttagaatatggtatgcctccgacaggtggtcttggtatcggtattgacagattggttatgttattaactgactctccatcaatcagagacgtattattattcccttatatgagacaaaaataa

SEQ ID NO: 7 - protein, 515 aa, Staphylococcus aureus
MFECTSWNTKGLQQVKGEKVMSEEMNDQMLVRRQKLQELYDLGIDPFGSKFDRSGLSSDLKEEWDQYSKEELVEKEADSHVAIAGRLMTKRGKGKAGFAHVQDLAGQIQIYVRKDQVGDDEFDLWKNADLGDIVGVEGVMFKTNTGELSGKAKKFTLLTKSLRPLPDKFHGLQDIEQRYRQRYLDLITNEDSTRTFINRSKIIQEMRNYLNNKGFLEVETPMMHQIAGGAAARPFVTHHNALDATLYMRIAIELHLKRLIVGGLEKVYEIGRVFRNEGVSTRHNPEFTMIELYEAYADYHDIMDLTESMVRHIANEVLGSAKVQYNGETIDLESAWTRLHIVDVVKEATGVDFYEVKSDEEAKALAKEHGIEIKDTMKYGHILNEFFEQKVEETLIQPTFIYGHPTEISPLAKKNPEDPRFTDRFELFIVGREHANAFTELNDPIDQKGRFEAQLVEKAQGNDEAHEMDEDYIEALEYGMPPTGGLGIGIDRLVMLLTDSPSIRDVLLFPYMRQK

SEQ ID NO: 8 - DNA, 32 bp, Staphylococcus aureus
cgcggggtaccatgtttgagtgtaccagttgg

SEQ ID NO: 9 - DNA, 40 bp, Staphylococcus aureus
gcgcggatcctttttgtctcatataagggaataataatac

SEQ ID NO: 10 - protein, 12 aa, Staphylococcus aureus
TRLHIVDAVKEA

SEQ ID NO: 11 - protein, 9 aa, Staphylococcus aureus
IRDVLLFPY

SEQ ID NO: 12 - protein, 27 aa, Staphylococcus aureus
YMRIAIELHLKRLIVGGLEKVYEIGRV

SEQ ID NO: 13 - DNA, 2652 bp, Streptococcus pneumoniae
atgtctaaagaactttcacctaaatacaatccagccgaggttgaggctggtcgttaccaaaaatggcttgatgcggatgttttcaagccttcaggcgatcaaaaggctaagccttattcaatcgtgattccaccaccaaacgtaactgggaaacttcaccttggtcacgcttgggatacgactttgcaggatatcatcatccgtcaaaaacgcatgcaaggctttgataccctttggcttccaggtatggaccacgctggtattgcgactcaggctaaggttgaggagcgcttacgtggtgagggtattacgcgttatgacctaggtcgtgagtctttcttgacgaaggtctgggaatggaaagacgaatatgccactaccatcaaggaacaatggggcaagatggggctttctgtagactattctcgtgagcgtttcactcttgatgaaggtttgtcaaaagctgttcgtaaggtctttgtgaacctttacaagaaaggctggatctatcgtggtgagtttatcatcaactgggacccagcagctcgcacagccctttctgatattgaggtgattcacaaggatgtagaaggtgccttctaccacatgaattacatgctggaagatggttcacgcgcccttgaagttgctacaactcgtcctgagactatgtttggggacgttgcggttgcggttaatccagaagacccgcgctacaaggacttgattggtaaaaacgtcatccttccaatcgctaataaactcatcccaatcgttggagatgagcacgcagatcctgagcttggtactggtgtcgtgaaaatcacacctgcccacgatccaaatgacttcttggttggccaacgtcataacttgccacaagtcaacgtcatgaacgacgacggaactatgaatgagcttgcctttgaattttcaggcatggatcgttttgaagctcgtaaggcagtcgttgctaagttggaagaaatcggtgcccttgtcaaaatcgaaaaacgtgtccacagtgttggtcactcagaacgtacaggtgtcgtagttgagccacgcttgtctactcaatggttcgtcaagatggaccaattggctaagaacgccattgctaaccaagacacagaggacaaggtcgaattctacccacctcgtttcaacgataccttccttcaatggatggaaaatgtccacgactgggttatctctcgtcagctttggtggggtcaccaaatccctgcctggtacaatgctgatggtgaaatgtatgtcggcgaagaagctccagaaggtgacggatggactcaggacgaagacgtcttggatacttggttcagttctgccctctggccattttcaaccatgggctggcctgaagtcgactcagaagactttaaacgttatttcccaacttcaaccttggtaacaggttacgacatcatcttcttctgggtgtctcgtatgatcttccagtccttggaatttactggtcgtcagccattccaaaacgtgcttatccacggtctcatccgtgacgagcaaggacgcaagatgtctaaatctctcggtaacgggattgacccaatggatgtcatcgagaaatacggtgctgatgcccttcgttggttcctttcaaacggttccgcaccaggtcaagacgttcgtttctcttacgagaaaatggatgcttcatggaactttattaacaaaatttggaacatttctcgctatatcctcatgaacaatgaaggtttgacgctggatgtggcgcatgacaatgtcacaaaagttgcaacaggtgaggctggtaatgtgacggaccgctggattctccacaatctcaacgaaaccattgcaaaagttactgaaaactttgataagttcgagtttggtgtggctggtcatatcctttacaacttcatctgggaagaatttgccaactggtatgttgagttgaccaaggaagttctatacagcgacaatgaagacgataaggtcattactcgatctgttctcctctatacgctggacaagatccttcgtctccttcacccaatcatgccattcgtgacagaggaaatctttggacaaatctcagaaggttctatcgtgacagctgcatacccaactgttaatctagcctttgaagaccttgcggctcacactggtgtggaaagtctcaaagacttgattcgtgctgttcggaatgcgcgtgcggaagtaaatgtagcaccaagcaagcctatcaccatccttgttaagacaagcgatagcgacttggaagccttctttaacagcaatgtcaactatatcaaacgctttacaaatccagaacacttggaaatcgcatcaaccatccctgcacctgaactggctatgtcaagtgtcatcacaggagcagaaatctacctgccactggccgatctcctcaatgttgaagaagaactggcccgtctcgacaaggaacttgctaaatggcaaaaagaactggacatggttggtaagaaactctctaacgaacgcttcgtagccaacgccaaaccagaagtcgtccaaaaagaatgcgacaaacaagctgactaccaagctaaatatgacgcgaccgtcgcacgtattgatgagatgaagaagttggtgaaatga

SEQ ID NO: 14 - protein, 883 aa, Streptococcus pneumoniae
MSKELSPKYNPAEVEAGRYQKWLDADVFKPSGDQKAKPYSIVIPPPNVTGKLHLGHAWDTTLQDIIIRQKRMQGFDTLWLPGMDHAGIATQAKVEERLRGEGITRYDLGRESFLTKVWEWKDEYATTIKEQWGKMGLSVDYSRERFTLDEGLSKAVRKVFVNLYKKGWIYRGEFIINWDPAARTALSDIEVIHKDVEGAFYHMNYMLEDGSRALEVATTRPETMFGDVAVAVNPEDPRYKDLIGKNVILPIANKLIPIVGDEHADPELGTGVVKITPAHDPNDFLVGQRHNLPQVNVMNDDGTMNELAFEFSGMDRFEARKAVVAKLEEIGALVKIEKRVHSVGHSERTGVVVEPRLSTQWFVKMDQLAKNAIANQDTEDKVEFYPPRFNDTFLQWMENVHDWVISRQLWWGHQIPAWYNADGEMYVGEEAPEGDGWTQDEDVLDTWFSSALWPFSTMGWPEVDSEDFKRYFPTSTLVTGYDIIFFWVSRMIFQSLEFTGRQPFQNVLIHGLIRDEQGRKMSKSLGNGIDPMDVIEKYGADALRWFLSNGSAPGQDVRFSYEKMDASWNFINKIWNISRYILMNNEGLTLDVAHDNVTKVATGEAGNVTDRWILHNLNETIAKVTENFDKFEFGVAGHILYNFIWEEFANWYVELTKEVLYSDNEDDKVITRSVLLYTLDKILRLLHPIMPFVTEEIFGQISEGSIVTAAYPTVNLAFEDLAAHTGVESLKDLIRAVRNARAEVNVAPSKPITILVKTSDSDLEAFFNSNVNYIKRFTNPEHLEIASTIPAPELAMSSVITGAEIYLPLADLLNVEEELARLDKELAKWQKELDMVGKKLSNERFVANAKPEVVQKECDKQADYQAKYDATVARIDEMKKLVK

SEQ ID NO: 15 - DNA, 2652 bp, Streptococcus pneumoniae
atgtctaaagaactttcacctaaatacaatccagccgaggttgaggctggtcgttaccaaaaatggcttgatgccgatgttttcaagccttcaggcgatcaaaaggctaagccttattcaatcgtgattccaccaccaaacgtaactgggaaactccaccttggtcacgcttgggatacaactttgcaagatattatcatccgtcaaaaacgcatgcaaggttttgataccctttggcttcctgggatggaccacgcagggattgccactcaggctaaggttgaggagcgcttgcgtggtgagggcatttcccgctatgaccttggtcgtgagtctttcttgacgaaagtctgggaatggaaagacgaatatgccactaccatcaaggaacaatggggcaagatggggctctctgtagactattctcgtgagcgtttcactcttgacgaaggtttgtcaaaagctgttcgtaaggtctttgtgaacctttacaagaaaggctggatctaccgtggtgaggttatcatcaactgggacccagcagctcgcacagccctttctgatattgaggtgattcacaaggatgtagaaggtgccttctaccacatgaattacatgctggaagatggttcacgcgcccttgaagttgctacaactcgtcctgagactatgtttggggacgttgcggttgcggttaatccagaagacccgcgctacaaggacttgattggtaaaaacgtcatccttccaatcgctaataaactcatcccaatcgttggagatgagcacgcagatcctgagcttggtactggtgtcgtgaaaatcacacctgcccacgatccaaatgacttcttggttggccaacgtcataacttgccacaagtcaacgtcatgaacgacgacggaactatgaatgagcttgcctttgaattttcaggcatggatcgttttgaagctcgtaaggcagtcgttgctaagttggaagaaatcggtgcccttgtcaaaatcgaaaaacgtgtccacagtgttggtcactcagaacgtacaggtgtcgtagttgagccacgcttgtctactcaatggttcgtcaagatggaccaattggctaagaacgccattgctaaccaagacacagaggacaaggtcgaattctacccacctcgtttcaacgataccttccttcaatggatggaaaatgtccacgactgggttatctctcgtcagctttggtggggtcaccaaatccctgcctggtacaatgctgatggtgaaatgtatgtcggcgaagaagctccagaaggtgacggatggactcaggacgaagacgtcttggatacttggttcagttctgccctctggccattttcaaccatgggctggcctgaagtcgactcagaagactttaaacgttatttcccaacttcaaccttggtaacaggttacgacatcatcttcttctgggtgtctcgtatgatcttccagtccttggaatttactggtcgtcagccattccaaaacgtgcttatccacggtctcatccgtgacgagcaaggacgcaagatgtctaaatctctcggtaacgggattgacccaatggatgtcatcgagaaatacggtgctgatgcccttcgttggttcctttcaaacggttccgcaccaggtcaagacgttcgtttctcttacgagaaaatggatgcttcatggaactttattaacaaaatttggaacatttctcgctatatcctcatgaacaatgaaggtttgacgctggatgtggcgcatgacaatgtcacaaaagttgcaacaggtgaggctggtaatgtgacggaccgctggattctccacaatctcaacgaaaccattgcaaaagttactgaaaactttgataagttcgagtttggtgtggctggtcatatcctttacaacttcatctgggaagaatttgccaactggtatgttgagttgaccaaggaagttctatacagcgacaatgaagacgataaggtcattactcgatctgttctcctctatacgctggacaagatccttcgtctccttcacccaatcatgccattcgtgacagagaaaatctttggtcagtacgctgaaggctctatcgtgacagcagcatacccaactatcaacccagcctttgaggaccttgctgcccacactggtgtggaaagtctcaaagacttgatccgtgccgttcgtaatgcgcgtgcggaagtaaatgtagcaccaagcaaacctattacaatccttgttaagactagcgatagtgacttggaagccttctttaacagcaatgtcaactacatcaaacgctttacaaatccagaacatttggaaatcgcatcaaccatccctgcacctgaactggctatgtcaagtgtcatcacaggagcagaaatctacctgccactggccgatctcctcaatgttgaagaagaactggcccgtctcgacaaggaacttgctaaatggcaaaaagaactggacatggttggtaagaaactctctaacgaacgcttcgtagccaacgccaaaccagaagtcgtccaaaaagaatgcgacaaacaagctgactaccaagctaaatatgacgcgaccgtcgcacgtattgatgagatgaagaagttggtgaaatga

SEQ ID NO: 16 - protein, 883 aa, Streptococcus pneumoniae
MSKELSPKYNPAEVEAGRYQKWLDADVFKPSGDQKAKPYSIVIPPPNVTGKLHLGHAWDTTLQDIIIRQKRMQGFDTLWLPGMDHAGIATQAKVEERLRGEGISRYDLGRESFLTKVWEWKDEYATTIKEQWGKMGLSVDYSRERFTLDEGLSKAVRKVFVNLYKKGWIYRGEVIINWDPAARTALSDIEVIHKDVEGAFYHMNYMLEDGSRALEVATTRPETMFGDVAVAVNPEDPRYKDLIGKNVILPIANKLIPIVGDEHADPELGTGVVKITPAHDPNDFLVGQRHNLPQVNVMNDDGTMNELAFEFSGMDRFEARKAVVAKLEEIGALVKIEKRVHSVGHSERTGVVVEPRLSTQWFVKMDQLAKNAIANQDTEDKVEFYPPRFNDTFLQWMENVHDWVISRQLWWGHQIPAWYNADGEMYVGEEAPEGDGWTQDEDVLDTWFSSALWPFSTMGWPEVDSEDFKRYFPTSTLVTGYDIIFFWVSRMIFQSLEFTGRQPFQNVLIHGLIRDEQGRKMSKSLGNGIDPMDVIEKYGADALRWFLSNGSAPGQDVRFSYEKMDASWNFINKIWNISRYILMNNEGLTLDVAHDNVTKVATGEAGNVTDRWILHNLNETIAKVTENFDKFEFGVAGHILYNFIWEEFANWYVELTKEVLYSDNEDDKVITRSVLLYTLDKILRLLHPIMPFVTEKIFGQYAEGSIVTAAYPTINPAFEDLAAHTGVESLKDLIRAVRNARAEVNVAPSKPITILVKTSDSDLEAFFNSNVNYIKRFTNPEHLEIASTIPAPELAMSSVITGAEIYLPLADLLNVEEELARLDKELAKWQKELDMVGKKLSNERFVANAKPEVVQKECDKQADYQAKYDATVARIDEMKKLVK

SEQ ID NO: 17 - DNA, 39 bp, Streptococcus pneumoniae
gcggcggcccatatgtctaaagaactttcacctaaatac

SEQ ID NO: 18 - DNA, 31 bp, Streptococcus pneumoniae
gcgcggatcctttcaccaacttcttcatctc

SEQ ID NO: 19 - protein, 23 aa, Streptococcus pneumoniae
ITRSVLLYTLDKILRLLHPIMPF

SEQ ID NO: 20 - protein, 9 aa, Streptococcus pneumoniae
RTGVVVEPR

SEQ ID NO: 21 - protein, 9 aa, Streptococcus pneumoniae
FQNVLIHGL

SEQ ID NO: 22 - DNA, 1764 bp, Streptococcus pneumoniae
atgaaacgtagtatgtatgctggtcgtgttcgtgaggaacacatcggacaagaaataaccttgaaaggatgggttggccgtcgtcgtgaccttggtggtttgatctttatcgatcttcgtgaccgtgaaggaatcatgcagttggttatcaaccctgaaaaagtatctgcagaggttatggcaacagctgaaagccttcgtagcgaatttgttattgaggtgactggtcaggtcgctgcgcgtgagcaagccaatgataagttgccaactggtgcggttgagttaaacgtgacagctcttattgtgcttaacacagctaagacaacaccatttgagattaaggatggcattgaggcaaatgacgatacacgtttgcgttaccgttaccttgaccttcgtcgtccagaaatgttggaaaatcttaaacttcgtgccaaggtgacccactctatccgcaactacttggatgagttggagtttatcgacgtggagacaccattcctttctaagtcaacgcctgaaggggcgcgtgattatttagtgccgtctcgtgttaataaggggcatttttacgctcttcctcaaagtccacaaatcacgaaacagctcttgatgaatgctggttttgaccgttactaccaaatcgttaaatgtttccgtgacgaggacttgcgtggagaccgccagcctgaatttactcaggtcgacttggaaacgtccttccttactgagcaagaaatccaagatattacagaaagcttgatcgcgcgcgtgatgaaggaaacaaaaggcatcgaagtaacgctaccattccctcgtatgaaatacgatgatgctatggctctttacggttctgacaagccagatactcgttttgacatgttgcttcaggacttgacagaagtggtccgaggtgtagactttaaagtcttttcagaagcacctgctgtaaaagcgattgtggtcacaggagctgcggacaactattcacgtaaagacatcgacaagatgacggaagtagccaaacagtatggtgccaaaggtcttgcttgggtcaaggtggttgatggagaattaaacggaccagttgccaagttcttgactggtatccaagaagaattgacaacagcgcttgttcttgaagataaggacttggttctctttgtggcggatacgcttgaagtggctaatgcaacactgggtgcccttcgtggacgtattgctaaagagcttggcttgattgataatgataagttcaacttcctttgggtggttgactggccgatgtttgaatggtctgaagaagaaggccgctacatgagcgcccaccatcctttcacacttccacaggaagagactgctcatgaattagaaggtgatttggctaaggttcgtgccattgcttacgatatcgtcttgaacggttatgagcttggtggtggtagccttcgtatcaaccaaaaagaccttcaagaacgcatgttcaaggctcttggtttctcaactgaagaagccaatgaccagtttggtttccttcttgaagccatggactatggtttcccaccacacggtggtttggctatcgggcttgaccgttttgtcatgttgcttgctggagaagaaaatatccgtgaagtcattgcctttcctaagaacaacaaggcaactgacccaatgacacaagctccatcaacagtcgctctcaaacaactagaggaactcagcttacaagtagaagaagatgaaacaaacaaaacgaattaa

SEQ ID NO: 23 - protein, 587 aa, Streptococcus pneumoniae
MKRSMYAGRVREEHIGQEITLKGWVGRRRDLGGLIFIDLRDREGIMQLVINPEKVSAEVMATAESLRSEFVIEVTGQVAAREQANDKLPTGAVELNVTALIVLNTAKTTPFEIKDGIEANDDTRLRYRYLDLRRPEMLENLKLRAKVTHSIRNYLDELEFIDVETPFLSKSTPEGARDYLVPSRVNKGHFYALPQSPQITKQLLMNAGFDRYYQIVKCFRDEDLRGDRQPEFTQVDLETSFLTEQEIQDITESLIARVMKETKGIEVTLPFPRMKYDDAMALYGSDKPDTRFDMLLQDLTEVVRGVDFKVFSEAPAVKAIVVTGAADNYSRKDIDKMTEVAKQYGAKGLAWVKVVDGELNGPVAKFLTGIQEELTTALVLEDKDLVLFVADTLEVANATLGALRGRIAKELGLIDNDKFNFLWVVDWPMFEWSEEEGRYMSAHHPFTLPQEETAHELEGDLAKVRAIAYDIVLNGYELGGGSLRINQKDLQERMFKALGFSTEEANDQFGFLLEAMDYGFPPHGGLAIGLDRFVMLLAGEENIREVIAFPKNNKATDPMTQAPSTVALKQLEELSLQVEEDETNKTN

SEQ ID NO: 24 - DNA, 1764 bp, Streptococcus pneumoniae
atgaaacgtagtatgtatgctggtcgtgttcgtgaggaacacatcggacaagaaataaccttgaaaggatgggttggccgtcgtcgtgaccttggtggtttgatctttatcgatcttcgtgaccgtgaaggaatcatgcagttggttatcaaccctgaaaaagtatctgcagaggttatggcaacagctgaaagccttcgtagcgaatttgttattgaggtgactggtcaggtcgctgcgcgtgagcaagccaatgataagttgccaactggtgcggttgagttaaacgtgacagctcttattgtgcttaacacagctaagacaacaccatttgagattaaggatggcattgaggcaaatgacgatacacgtttgcgttaccgttaccttgaccttcgtcgtgcagaaatgttggaaaatcttaaacttcgtgccaaggtgacccactctatccgcaactatttggatgagttggagtttatcgacgtggagacaccattcctttctaagtcaacgcctgaaggggcgcgtgattatttagtgccgtctcgtgttaataaggggcatttttacgctcttcctcaaagtccacaaatcacgaaacagctcttgatgaatgctggttttgaccgttactaccaaatcgttaaatgtttccgtgacgaggacttgcgtggagaccgccagcctgaatttactcaggtcgacttggaaacgtccttccttactgagcaagaaatccaagatattacagaaagcttgatcgcgcgcgtgatgaaggaaacaaaaggcatcgaagtaacgctaccattccctcgtatgaaatacgatgatgctatggctctttacggttctgacaagccagatactcgttttgacatgttgcttcaggacttgacagaagtggtccgaggtgtagactttaaagtcttttcagaagcacctgctgtaaaagcgattgtggtcacaggagctgcggacaactattcacgtaaagacatcgacaagatgacggaagtagccaaacagtatggtgccaaaggtcttgcttgggtcaaggtggttgatggagaattaaacggaccagttgccaagttcttgactggtatccaagaagaattgacaacagcgcttgttcttgaagataaggacttggttctctttgtggcggatacgcttgaagtggctaatgcaacactgggtgcccttcgtggacgtattgctaaagagcttggcttgattgataatgataagttcaccttcctttgggtggttgactggccgatgtttgaatggtctgaagaagaaggccgctacatgagcgcccaccatccattcacacttccacaggaagagactgctcacgaattagaaggtgatttggctaaggttcgtgccattgcttacgatatcgtcttgaacggttatgagcttggtggtggtagccttcgtatcaaccaaaaagaccttcaagaacgcatgttcaaggctcttggtttctcaactgaagaagccaatgaccagtttggtttccttcttgaagccatggactatggtttcccaccacacggtggtttggctatcgggcttgaccgttttgtcatgttgcttgctggagaagaaaatatccgtgaagtcattgcctttcctaagaacaacaaggcaactgacccaatgacacaagctccatcaacagtcgctctcaaacaactagaggaactcagcttacaagtagaagaagatgaaacaaacaaaacgaattaa

SEQ ID NO: 25 - protein, 587 aa, Streptococcus pneumoniae
MKRSMYAGRVREEHIGQEITLKGWVGRRRDLGGLIFIDLRDREGIMQLVINPEKVSAEVMATAESLRSEFVIEVTGQVAAREQANDKLPTGAVELNVTALIVLNTAKTTPFEIKDGIEANDDTRLRYRYLDLRRAEMLENLKLRAKVTHSIRNYLDELEFIDVETPFLSKSTPEGARDYLVPSRVNKGHFYALPQSPQITKQLLMNAGFDRYYQIVKCFRDEDLRGDRQPEFTQVDLETSFLTEQEIQDITESLIARVMKETKGIEVTLPFPRMKYDDAMALYGSDKPDTRFDMLLQDLTEVVRGVDFKVFSEAPAVKAIVVTGAADNYSRKDIDKMTEVAKQYGAKGLAWVKVVDGELNGPVAKFLTGIQEELTTALVLEDKDLVLFVADTLEVANATLGALRGRIAKELGLIDNDKFTFLWVVDWPMFEWSEEEGRYMSAHHPFTLPQEETAHELEGDLAKVRAIAYDIVLNGYELGGGSLRINQKDLQERMFKALGFSTEEANDQFGFLLEAMDYGFPPHGGLAIGLDRFVMLLAGEENIREVIAFPKNNKATDPMTQAPSTVALKQLEELSLQVEEDETNKTN

SEQ ID NO: 26 - DNA, 34 bp, Streptococcus pneumoniae
gcggcggcccatatgaaacgtagtatgtatgctg

SEQ ID NO: 27 - DNA, 34 bp, Streptococcus pneumoniae
gcgcggatccattcgttttgtttgtttcatcttc

SEQ ID NO: 28 - protein, 16 aa, Streptococcus pneumoniae
TGAVELNVTALIVLNT

SEQ ID NO: 29 - protein, 32 aa, Streptococcus pneumoniae
DMLLQDLTEVVRGVDFKVFSEAPAVKAIVVTG

SEQ ID NO: 30 - protein, 29 aa, Streptococcus pneumoniae
TTALVLEDKDLVLFVADTLEVANATLGAL

SEQ ID NO: 31 - DNA, 1398 bp, Helicobacter pylori
atgtttatttatgataccaaattaaaacaaaaagtcccttttgagcctttagtccaaaataaggcgaatatttatgtgtgcgggcctacggtgtatgatgacgctcatttagggcatgccaggagcgcgattgcttttgatttgttaaggcgcacgcttgaattgagcggctatgaagtgatgctagtaaggaatttcacagatattgacgataagatcatcaacaaagccctaaaagaaaacaaaagcattcaagaattaagcagcatttatattgaatcttacacgagggatttgaacgctttgaacgtgaaaaaacccagcctagagcctaaagcgagcgagtatttagacgctatggtgggcatgattgaaacgcttttagaaaaaaatatcgcttatcaggtctctaatggggatatttatttagacacgagcaaggataaagattacggctctttgagcgtgcataatagcagcattgaatttggccgtattggtttggtgcaagaaaaacggcttgagcaggattttgtgttatggaaaagctataagggggataatgatgtgggctttgatagccctttaggcaaagggcgccctggctggcatatagaatgctctagcatggtttttgaaactttagcgctcactaacaccccctatcaaattgatatccatgcaggcggagcggatttgttattcccccaccatgaaaatgaagcgtgccaaacccgttgcgcctttggcgtggagcttgccaaatattggatgcataacggctttgtgaatatcaataacgaaaaaatgtctaaaagtttggggaatagcttttttgttaaagacgctctcaaaaactatgatggcgaaattttgcgcaattacttactaggggtgcattatcgctctgttttgaatttcaatgaagaagacttgttagtgagtaaaaaacgcttggataaaatctatcgtttaaaacagcgcgttttagggactcttggaggaataaatccaaactttaaaaaagaaattttagagtgcatgcaagatgatttaaacgtttctaaagcgttgagcgttttagaaagcatgctttcttccactaatgaaaaattggatcaaaaccctaaaaacaaggctttaaagggcgaaattttagcgaatttgaaattcatagaagaactgcttggcatcgggtttaaagaccctagcgcctatttccaattaggcgtgagtgaaagcgaaaaacaagaaattgaaaacaagatagaagaaagaaaacgcgccaaagagcgaaaagattttttaaaagccgatagcatcagagaagagcttttgaaacaaaaaatcgctttgatggacaccccacaaggcacgatctgggagaagtttttttaa

SEQ ID NO: 32 - protein, 465 aa, Helicobacter pylori
MFIYDTKLKQKVPFEPLVQNKANIYVCGPTVYDDAHLGHARSAIAFDLLRRTLELSGYEVMLVRNFTDIDDKIINKALKENKSIQELSSIYIESYTRDLNALNVKKPSLEPKASEYLDAMVGMIETLLEKNIAYQVSNGDIYLDTSKDKDYGSLSVHNSSIEFGRIGLVQEKRLEQDFVLWKSYKGDNDVGFDSPLGKGRPGWHIECSSMVFETLALTNTPYQIDIHAGGADLLFPHHENEACQTRCAFGVELAKYWMHNGFVNINNEKMSKSLGNSFFVKDALKNYDGEILRNYLLGVHYRSVLNFNEEDLLVSKKRLDKIYRLKQRVLGTLGGINPNFKKEILECMQDDLNVSKALSVLESMLSSTNEKLDQNPKNKALKGEILANLKFIEELLGIGFKDPSAYFQLGVSESEKQEIENKIEERKRAKERKDFLKADSIREELLKQKIALMDTPQGTIWEKFF

SEQ ID NO: 33 - DNA, 1398 bp, Helicobacter pylori
atgtttatttatgataccaaattaaaacaaaaagtcccttttgagcctttagtccaaaataaggcgaatgtttatgtgtgcgggcctacggtgtatgatgacgctcatttagggcatgccaggagcgcgattgcttttgatttgttaaggcgcacccttgaattgagcggctatgaagtggtgctagtaaggaatttcaccgatattgacgataaaatcatcaacaaagccttaaaagaaaacaaaagcattcaagaattaagcagtatttatattgaatcttacacaagggatctgaacgctttgaacgtgaaaaaacccagcctagagcctaaagcgagcgagtatttagacgctatggtgcgcatgattgaaacgcttttagaaaaaaatatcgcttatcaggtctctaatggggatatttatttagacacgagcgaggataaagattacggctctttgagcatgcataatagcagtattgaatttggccgtattggtttggtgcaagaaaaacggcttgatcaggattttgtgttatggaaaagctataagggggataatgatgtgggctttgatagccctttaggtaaggggcgccctggctggcatatagaatgctctagcatggtttttgaaactttagcgctcactaacaccccctatcaaattgatatccatgcaggcggagcggatttgttattcccccaccatgaaaatgaagcgtgccaaacccgttgcgcctttggcgtggagcttgccaaatattggatgcataacggctttgtgaatatcaataacgaaaaaatgtctaaaagtttggggaatagcttttttgttaaagacgctctcaaaaactatgatggcgaaattttgcgcaattacttactaggggtgcattatcgctctgttttgaatttcaatgaagaagacttgttagtgagtaaaaaacgcttggataaaatctatcgtttaaaacagcgcgttttagggactcttggaggaataaatccaaactttaaaaaagaaattttagagtgcatgcaagatgatttaaacgtttctaaagcgttgagcgttttagaaagcatgctttcttccactaatgaaaaattggatcaaaaccctaaaaacaaggctttaaagggcgaaattttagcgaatttgaaattcatagaagaactgcttggcatcgggtttaaagaccctagcgcctatttccaattaggcgtgagtgaaagcgaaaaacaagaaattgaaaacaagatagaagaaagaaaacgcgccaaagagcgaaaagattttttaaaagccgatagcatcagagaagagcttttgaaacaaaaaatcgctttgatggacaccccacaaggcacgatctgggagaagtttttttaa

SEQ ID NO: 34 - protein, 465 aa, Helicobacter pylori
MFIYDTKLKQKVPFEPLVQNKANVYVCGPTVYDDAHLGHARSAIAFDLLRRTLELSGYEVVLVRNFTDIDDKIINKALKENKSIQELSSIYIESYTRDLNALNVKKPSLEPKASEYLDAMVRMIETLLEKNIAYQVSNGDIYLDTSEDKDYGSLSMHNSSIEFGRIGLVQEKRLDQDFVLWKSYKGDNDVGFDSPLGKGRPGWHIECSSMVFETLALTNTPYQIDIHAGGADLLFPHHENEACQTRCAFGVELAKYWMHNGFVNINNEKMSKSLGNSFFVKDALKNYDGEILRNYLLGVHYRSVLNFNEEDLLVSKKRLDKIYRLKQRVLGTLGGINPNFKKEILECMQDDLNVSKALSVLESMLSSTNEKLDQNPKNKALKGEILANLKFIEELLGIGFKDPSAYFQLGVSESEKQEIENKIEERKRAKERKDFLKADSIREELLKQKIALMDTPQGTIWEKFF

SEQ ID NO: 35 - DNA, 40 bp, Helicobacter pylori
gcggcggcccatatgtttatttatgataccaaattaaaac

SEQ ID NO: 36 - DNA, 32 bp, Helicobacter pylori
gcgcggatccaaaaaacttctcccagatcgtg

SEQ ID NO: 37 - protein, 44 aa, Helicobacter pylori
NIYVCGPTVYDDAHLGHARSAIAFDLLRRTLELSGYEVMLVRNF

SEQ ID NO: 38 - protein, 14 aa, Helicobacter pylori
RNYLLGVHYRSVLN

SEQ ID NO: 39 - protein, 13 aa, Helicobacter pylori
KQKVPFEPLVQNK

SEQ ID NO: 40 - DNA, 939 bp, Pseudomonas aeruginosa
atgtctgcatccctcgcattcgtcttccctggccagggttcgcaatccctcggcatgctggccgagctgggcgcccagcaggcgctggtgcgcgataccttcgccgaggcctccgaggcgctcggttacgacctttgggcgctggtccagaatggtcctgaagagcgcctgaaccagaccgacaagacccagccggccatccttacggtttcgatcgcgctctggcgcctctggctggccgagggcggtgcgcgcccggcgttcgtcgccgggcacagcctgggcgaatattccgcgctggtcgcggccgaaagcctggcgttcgccgatgcggtcaagctggtcgagcgtaggggccaactgatgcagcaggcggttccggcggggcagggcggcatggccgcgatccttggcctggaagacgccgatgtattggcggcctgtgccgaggcggcccagggcgaggtggtcagcgcggtcaacttcaacgcgccggggcaggtagtgatcgccggtgccgcggctgccgttgagcgtgccatcgaggcatgcaaggcacgcggcgccaagcgcgcggtggcgttgccagtcagcgtgccgtcgcattgcgaactgatgcgtccggccgccgagcagttcgccgcctcggtcgaaagcctgcagtggcaggcgccgaagatttcgctggtgcagaacgtcagcgccgccgtgccggctgatctcgatacgctgcgccgcgacctgctggcacagctgtacagcccggttcgctgggtggagagcatccagctgctggcggaaaagggcgtcaccgagctggtcgagtgcgggccgggcaaggtcctggcaggcctcaacaggcgctgcgcgaagggcatcaatacccatggcctggatggcgtcgaggcgttcgccgccacgcgcgccgccctggcctga

SEQ ID NO: 41 - protein, 312 aa, Pseudomonas aeruginosa
MSASLAFVFPGQGSQSLGMLAELGAQQALVRDTFAEASEALGYDLWALVQNGPEERLNQTDKTQPAILTVSIALWRLWLAEGGARPAFVAGHSLGEYSALVAAESLAFADAVKLVERRGQLMQQAVPAGQGGMAAILGLEDADVLAACAEAAQGEVVSAVNFNAPGQVVIAGAAAAVERAIEACKARGAKRAVALPVSVPSHCELMRPAAEQFAASVESLQWQAPKISLVQNVSAAVPADLDTLRRDLLAQLYSPVRWVESIQLLAEKGVTELVECGPGKVLAGLNRRCAKGINTHGLDGVEAFAATRAALA

SEQ ID NO: 42 - DNA, 939 bp, Pseudomonas aeruginosa
atgtctgcatccctcgcattcgtcttccctggccagggttcgcaatccctcggcatgctggccgagctgggcgcccagcaggcgctggtgccggataccttcgccgaggcctccgaggcgctcggttacgacctttgggcgctggtccagaatggtcctgaagagcgcctgaaccagaccgacaagacccagccggccatcctcacggtttcgatcgcgctctggcgcctctggctggccgagggcggtgcgcgcccagcgttcgtcgccgggcacagcctgggcgaatattccgcgctggtcgcggccgaaagcctggcgttcgccgatgcggtcaagctggtcgagcgtaggggccaactgattcagcaggcggttccggcggggcagggcggcatggccgcgatccttggcctggaagacgccgatgtattggcggcctgtgccgaggcggcccagggcgaggtggtcagcgcggtcaacttcaacgcgccggggcaggtagtgatcgccggtgccgcggctgccgttgagcgtgccatcgaggcatgcaaggcacgcggcgccaagcgcgcggtggcgctgccagtcagtgtgccgtcgcattgcgaactgatgcgtccggccgccgagcagttcgccgcctcggtcgaaagcctgcagtggcaggcgccgaagattgcgctggtgcagaacgtcagcgccgccgtgccggctgatctcgatacgctgcgccgcgacctgctggcacagctgtacagcccggttcgctgggtggagagcatccagctgctggcggaaaagggcgtcaccgagctggtcgagtgcgggccgggcaaggtcctggcaggcctcaacaggcgctgcgcgaagggcatcaatacccatggcctggatggcgtcgaggcgttcgccgccacgcgcgccgccctggcctga

SEQ ID NO: 43 - protein, 312 aa, Pseudomonas aeruginosa
MSASLAFVFPGQGSQSLGMLAELGAQQALVPDTFAEASEALGYDLWALVQNGPEERLNQTDKTQPAILTVSIALWRLWLAEGGARPAFVAGHSLGEYSALVAAESLAFADAVKLVERRGQLIQQAVPAGQGGMAAILGLEDADVLAACAEAAQGEVVSAVNFNAPGQVVIAGAAAAVERAIEACKARGAKRAVALPVSVPSHCELMRPAAEQFAASVESLQWQAPKIALVQNVSAAVPADLDTLRRDLLAQLYSPVRWVESIQLLAEKGVTELVECGPGKVLAGLNRRCAKGINTHGLDGVEAFAATRAALA

SEQ ID NO: 44 - DNA, 33 bp, Pseudomonas aeruginosa
gcggcggcccatatgtctgcatccctcgcattc

SEQ ID NO: 45 - DNA, 25 bp, Pseudomonas aeruginosa
gcgcggatccggccagggcggcgcg

SEQ ID NO: 46 - protein, 17 aa, Pseudomonas aeruginosa
KRAVALPVSVPSHCELM

SEQ ID NO: 47 - protein, 18 aa, Pseudomonas aeruginosa
AAILGLEDADVLAACAEA

SEQ ID NO: 48 - protein, 11 aa, Pseudomonas aeruginosa
QGEVVSAVNFN

SEQ ID NO: 49 - DNA, 1392 bp, Helicobacter pylori
atgagtttgatcgttacgcgcttcgctccatcgcccactggctacctccacataggaggcttaagaacagccattttcaattatctttttgcacgagccaatcaaggaaaattttttttacgcattgaagacacggatttgagccgtaactctatagaagcggctaacgccattatagaagctttcaaatgggtagggctagaatacgatggcgaaatcctctaccaatccaaacgctttgagatttataaagaatacattcaaaaactcttagatgaagacaaagcctattattgttacatgagcaaagaagagttggacgctttgagagaagagcaaaaagccaggaaagaaaccccacgctatgacaatcgctatcgtgattttaaaggcacgcctcctaaaggcatagagcctgtggtaaggattaaagtcccccaaaatgaggtgattggttttaatgacggggttaaaggcgaagtgaaagtgaatactaacgaattagacgattttattatcgccaggagcgatgggacacccacttataactttgtggttactattgatgacgctttaatggggattactgatgtgattagaggcgatgatcacctttctaacacccctaaacaaatcgttctttataaggctttgaattttaaaatccctaattttttccatgtgccgatgattttgaatgaagaagggcaaaaattaagcaaacgccatggggccactaatgtgatggactatcaagaaatgggctatcttaaggaagctttagtgaattttttagcgcgtttggggtggagctatcaggataaagaggtttttagcatgcaagaattgctagaattatttgatcctaaagatttgaattcttcgcccagttgcttcagctggcacaagcttaattggctcaacgctcattatttaaaaaaccaaagtgtgcaagaattgttaaaacttttaaagccttttagttttagcgatctctcgcatttaaaccccactcaattggatcgcttgttagacgctctcaaagaaagatctcaaacactaaaagaattagcccttaaaatagatgaggttttaatcgcccctgtggagtatgaagaaaaggtttttaaaaaactcaatcaagcgctcgttatgcccttgttagaaaagtttaagctagaattaaacaaagccaatttcaacgatgaaagcgcgctagaaaacgccatgcgccaaatcattgaagaagaaaagattaaagcgggtagttttatgcagcctttaagattggcccttttgggtaagggaggcgggataggccttaaagaagcgctttttattttaggcaaaacagagagcgtcaaaagaatagaggattttttgaaaaactaa

SEQ ID NO: 50 - protein, 463 aa, Helicobacter pylori
MSLIVTRFAPSPTGYLHIGGLRTAIFNYLFARANQGKFFLRIEDTDLSRNSIEAANAIIEAFKWVGLEYDGEILYQSKRFEIYKEYIQKLLDEDKAYYCYMSKEELDALREEQKARKETPRYDNRYRDFKGTPPKGIEPVVRIKVPQNEVIGFNDGVKGEVKVNTNELDDFIIARSDGTPTYNFVVTIDDALMGITDVIRGDDHLSNTPKQIVLYKALNFKIPNFFHVPMILNEEGQKLSKRHGATNVMDYQEMGYLKEALVNFLARLGWSYQDKEVFSMQELLELFDPKDLNSSPSCFSWHKLNWLNAHYLKNQSVQELLKLLKPFSFSDLSHLNPTQLDRLLDALKERSQTLKELALKIDEVLIAPVEYEEKVFKKLNQALVMPLLEKFKLELNKANFNDESALENAMRQIIEEEKIKAGSFMQPLRLALLGKGGGIGLKEALFILGKTESVKRIEDFLKN

SEQ ID NO: 51 - DNA, 1392 bp, Helicobacter pylori
atgagtttgatcgttacgcgcttcgctccatcgcccactggctacctccacataggaggcttaagaacagccattttcaattatctttttgcacgagccaatcaaggaaaattttttttacgcattgaagacacggatttgagccgtaactctatagaagcggctaacgccattatagaggctttcaaatgggtagggctagaatacgatggagaaatcctctaccaatccaaacgctttgagatttataaagaatatatccaaaaactcttagatgaaggcaaagcgtattattgctacatgagtaaagatgagttggacgctttgagagaagaacaaaaggccaagaaagaaaccccacgctatgacaatcgctatcgtgattttaaaggcacgccccctaaaggcatagagcctgtagtaaggattaaagtcccccaaaatgaggtgattggttttaatgacggggttaaaggcgaagtgaaagtgaatactaacgaattagacgattttattatcgccaggagcgatgggacacccacttataactttgtggttactattgatgacgctttaatggggattactgatgtgattagaggcgatgatcacctttctaacacccctaaacaaatcgttctttataaggctttgaattttaaaatccctaattttttccatgtgccgatgattttgaatgaagaaggacaaaaattaagcaaacgccatggggccactaatgtgatggactatcaagaaatgggctatcttaaggaagctttagtgaattttttagcgcgtttagggtggagctatcaagataaagaaatttttagcatgcaagaattgctagaattatttgatcctaaagatttaaattcttcgcccagttgcttcagctggcacaagcttaattggctcaacgctcactatttaaaaaaccaaagcgcgcaagaattgttaaaacttttaaagccttttagttttagcgatctctcgcatttaaaccccacccaattggatcgtttgttggacgctctcaaagaaagatctcaaaccttaaaagaattagcccttaaaatagatgaggttttaatcgctcctgtggagtatgaagaaaaggtttttaaaaagctcgatcaagcgctcgttatgcccttgttagaaaagtttaagctggaattaaaagaagccaatttcaacgatgaaagcgcgctagaaaacgccatgcacaaaatcattgaagaagaaaagattaaagcgggtagtttcatgcagcctttaagattagcccttttgggcaaggggggcgggataggccttaaagaagcgctttttattttaggcaaaacagagagcgtcaaaagaatagaggattttttgaaaaactaa

SEQ ID NO: 52 - protein, 463 aa, Helicobacter pylori
MSLIVTRFAPSPTGYLHIGGLRTAIFNYLFARANQGKFFLRIEDTDLSRNSIEAANAIIEAFKWVGLEYDGEILYQSKRFEIYKEYIQKLLDEGKAYYCYMSKDELDALREEQKAKKETPRYDNRYRDFKGTPPKGIEPVVRIKVPQNEVIGFNDGVKGEVKVNTNELDDFIIARSDGTPTYNFVVTIDDALMGITDVIRGDDHLSNTPKQIVLYKALNFKIPNFFHVPMILNEEGQKLSKRHGATNVMDYQEMGYLKEALVNFLARLGWSYQDKEIFSMQELLELFDPKDLNSSPSCFSWHKLNWLNAHYLKNQSAQELLKLLKPFSFSDLSHLNPTQLDRLLDALKERSQTLKELALKIDEVLIAPVEYEEKVFKKLDQALVMPLLEKFKLELKEANFNDESALENAMHKIIEEEKIKAGSFMQPLRLALLGKGGGIGLKEALFILGKTESVKRIEDFLKN

SEQ ID NO: 53 - DNA, 32 bp, Helicobacter pylori
gcggcggcccatatgagtttgatcgttacgcg

SEQ ID NO: 54 - DNA, 33 bp, Helicobacter pylori
gcgcggatccgtttttcaaaaaatcctctattc

SEQ ID NO: 55 - protein, 12 aa, Helicobacter pylori
KQIVLYKALNFK

SEQ ID NO: 56 - protein, 14 aa, Helicobacter pylori
IEPVVRIKVPQNEV

SEQ ID NO: 57 - protein, 21 aa, Helicobacter pylori
LKELALKIDEVLIAPVEYEEK

SEQ ID NO: 58 - DNA, 219 bp, Pseudomonas aeruginosa
atgtcgaaagaagacagcttcgaaatggaaggtactgtcgtcgacaccctgcccaacaccatgttccgtgtggagttggaaaatgggcacgtcgtcaccgcgcacatctccggcaaaatgcgcaagaactacatccgcatcctcaccggcgacaaggtccgcgtggaactgacgccctacgacctgagcaagggccgcatcacctaccgcgcccgctga

SEQ ID NO: 59 - protein, 72 aa, Pseudomonas aeruginosa
MSKEDSFEMEGTVVDTLPNTMFRVELENGHVVTAHISGKMRKNYIRILTGDKVRVELTPYDLSKGRITYRAR

SEQ ID NO: 60 - DNA, 219 bp, Pseudomonas aeruginosa; identical to SEQ ID NO: 58

SEQ ID NO: 61 - protein, 72 aa, Pseudomonas aeruginosa; identical to SEQ ID NO: 59

SEQ ID NO: 62 - DNA, 33 bp, Pseudomonas aeruginosa
gcggcggcccatatgtcgaaagaagacagcttc

SEQ ID NO: 63 - DNA, 26 bp, Pseudomonas aeruginosa
gcgcggatccgcgggcgcggtaggtg

SEQ ID NO: 64 - protein, 10 aa, Pseudomonas aeruginosa
ENGHVVTAHI

SEQ ID NO: 65 - protein, 7 aa, Pseudomonas aeruginosa
GTVVDTL

SEQ ID NO: 66 - protein, 13 aa, Pseudomonas aeruginosa
GDKVRVELTPYDL

SEQ ID NO: 67 - DNA, 588 bp, Streptococcus pneumoniae
gtgcgggcttgtatatttacaagtccgctattgtttttctctaataaaacaaaagaggtgaaaaccatagcaaagcaagacttattcatcaatgatgagattcgtgtacgtgaagttcgcttgattggtcttgaaggagaacagctaggtatcaagccactcagtgaagcgcaagctttggctgataacgctaatgttgacctagtattgattcaaccccaagccaaaccgcctgttgcaaaaattatggactacggtaagttcaaatttgagtaccagaagaagcaaaaagaacaacgtaaaaaacaaagcgttgttactgtgaaagaagttcgtctaagtccaacaattgacaagggtgactttgatacaaaacttcgtaatgcacgtaagttccttgaaaaaggaaataaagttaaggtatctattcgctttaagggtcgtatgattacccataaagagattggtgcaaaagttttagccgagtttgctgaagcaactcaagatattgccatcatcgaacaacgtgctaaaatggatggacgtcaaatgttcatgcaattggcgccagcgactgacaaaaaataa

SEQ ID NO: 68 - protein, 195 aa, Streptococcus pneumoniae
VRACIFTSPLLFFSNKTKEVKTIAKQDLFINDEIRVREVRLIGLEGEQLGIKPLSEAQALADNANVDLVLIQPQAKPPVAKIMDYGKFKFEYQKKQKEQRKKQSVVTVKEVRLSPTIDKGDFDTKLRNARKFLEKGNKVKVSIRFKGRMITHKEIGAKVLAEFAEATQDIAIIEQRAKMDGRQMFMQLAPATDKK

SEQ ID NO: 69 - DNA, 588 bp, Streptococcus pneumoniae
gtgcgggcttgtatatttacaagtccgctattgtttttctctaataaaacaaaagaggtgaaaaccatagcaaagcaagacttattcatcaatgatgagattcgtgtacgtgaagttcgcttgattggtcttgaaggagaacagctaggcatcaagccactcagtgaagcgcaagctttggctgataacgctaatgttgacctagtattgattcaaccccaagccaaaccgcctgttgcaaaaattatggactacggtaagttcaaatttgagtaccagaagaagcaaaaagaacaacgtaaaaaacaaagcgttgttactgtgaaagaagttcgtctaagtccaacaattgacaagggtgactttgatacaaaacttcgtaatgcacgtaagttccttgaaaaaggaaataaagttaaggtatctattcgctttaagggtcgtatgattacccataaagagattggtgcaaaagttttagccgagtttgctgaagcaactcaagatattgccatcatcgaacaacgtgctaaaatggatggacgtcaaatgttcatgcaattggcgccagcgactgacaaaaaataa

SEQ ID NO: 70 - protein, 195 aa, Streptococcus pneumoniae; identical to SEQ ID NO: 68

SEQ ID NO: 71 - DNA, 35 bp, Streptococcus pneumoniae
gcggcggcccatatgcgggcttgtatatttacaag

SEQ ID NO: 72 - DNA, 30 bp, Streptococcus pneumoniae
gcgcggatccttttttgtcagtcgctggcg

SEQ ID NO: 73 - protein, 17 aa, Streptococcus pneumoniae
VDLVLIQPQAKPPVAKI

SEQ ID NO: 74 - protein, 15 aa, Streptococcus pneumoniae
KQSVVTVKEVRLSPT

SEQ ID NO: 75 - protein, 11 aa, Streptococcus pneumoniae
CIFTSPLLFFS

SEQ ID NO: 76 - DNA, 1983 bp, Streptococcus pneumoniae
atgcttagaaactatgaaataataaaaaaggagaacatcatgattaacattactttcccagatggcgctgttcgtgaattcgaatctggcgtaacaacttttgaaattgcccaatctatcagcaattccctagctaaaaaagccttggctggtaaattcaacggcaaactcatcgacactactcgcgctatcactgaagatggaagcatcgaaattgtgacacctgatcacgaagatgcccttccaatcttgcgtcactcagcagctcacttgttcgcccaagcagctcgtcgtcttttcccagacattcacttgggagttggtccagccatcgaagatggtttctactacgatactgacaacacagctggtcaaatctctaacgaagaccttcctcgtatcgaagaagaaatgcaaaaaatcgtcaaagaaaacttcccatctattcgtgaagaagtgactaaagacgaggcacgtgaaatcttcaaaaatgacccttacaagttggaattgattgaagaacactcagaagacgaaggcggtttgactatctatcgtcagggtgaatatgtagacctctgccgtggacctcacgttccatcaacaggtcgtatccaaatcttccaccttctccatgtagctggtgcgtactggcgtggaaacagcgacaacgctatgatgcaacgtatctacggtacagcttggtttgacaagaaagacttgaaaaactaccttcaaatgcgtgaagaagctaaggaacgtgaccaccgtaaacttggtaaagagcttgacctctttatgatttcacaagaagtgggacaaggtttgccattctggttgccaaatggtgcgactatccgtcgtgaattggaacgctacatcgtaaacaaagagttggtttctggctaccaacacgtctacactccaccacttgcttctgttgagctttacaagacttctggtcactgggatcattaccaagaagacatgttcccaaccatggacatgggtgacggggaagaatttgtccttcgtccaatgaactgtccgcaccacatccaagttttcaaacaccatgttcactcttaccgtgaattgccaatccgtatcgctgaaatcggtatgatgcaccgttacgaaaaatctggtgccctcactggccttcaacgtgtacgtgaaatgtcactcaacgacggtcacctattcgttactccagaacaaatccaagaagaattccaacgtgcccttcagttgattatcgatgtttatgaagacttcaacttgactgactaccgcttccgcctctctcttcgtgaccctcaagatactcataagtactttgataacgatgagatgtgggaaaatgcccaaaccatgcttcgtgcagctcttgatgaaatgggcgtggactactttgaagccgaaggtgaagcagccttctacggaccaaaattggatatccagattaaaactgcccttggaaaagaagaaaccctttctactatccaacttgatttcttgttgccagaacgcttcgacctcaaatacatcggagctgatggcgaagatcaccgtccagtcatgatccaccgtggggttatctcaactatggaacgcttcacagctatcttgattgagaactacaagggggccttcccaacatggctggcaccacaccaagtaaccctcatcccagtatctaacgaaaaacacgtggactacgcttgggaagtggccaagaaactccgtgaccgcggtgtccgtgcagacgtagatgagcgcaatgaaaaaatgcagttcaagatccgtgcttcacaaaccagcaagattccttaccaattaattgttggagacaaagaaatggaagacgaaacagtcaacgttcgtcgctacggccaaaaagaaacacaaactgtctcagttgataattttgttcaagctatcctagctgatatcgccaacaaatcacgcgttgagaaataa

SEQ ID NO: 77 - protein, 660 aa, Streptococcus pneumoniae
MLRNYEIIKKENIMINITFPDGAVREFESGVTTFEIAQSISNSLAKKALAGKFNGKLIDTTRAITEDGSIEIVTPDHEDALPILRHSAAHLFAQAARRLFPDIHLGVGPAIEDGFYYDTDNTAGQISNEDLPRIEEEMQKIVKENFPSIREEVTKDEAREIFKNDPYKLELIEEHSEDEGGLTIYRQGEYVDLCRGPHVPSTGRIQIFHLLHVAGAYWRGNSDNAMMQRIYGTAWFDKKDLKNYLQMREEAKERDHRKLGKELDLFMISQEVGQGLPFWLPNGATIRRELERYIVNKELVSGYQHVYTPPLASVELYKTSGHWDHYQEDMFPTMDMGDGEEFVLRPMNCPHHIQVFKHHVHSYRELPIRIAEIGMMHRYEKSGALTGLQRVREMSLNDGHLFVTPEQIQEEFQRALQLIIDVYEDFNLTDYRFRLSLRDPQDTHKYFDNDEMWENAQTMLRAALDEMGVDYFEAEGEAAFYGPKLDIQIKTALGKEETLSTIQLDFLLPERFDLKYIGADGEDHRPVMIHRGVISTMERFTAILIENYKGAFPTWLAPHQVTLIPVSNEKHVDYAWEVAKKLRDRGVRADVDERNEKMQFKIRASQTSKIPYQLIVGDKEMEDETVNVRRYGQKETQTVSVDNFVQAILADIANKSRVEK

SEQ ID NO: 78 - DNA, 1983 bp, Streptococcus pneumoniae
atgcttagaaactatgaaataataaaaaaggagaacatcatgattaacattactttcccagatggcgctgttcgtgaattcgaatctggcgtaacaacttttgaaattgcccaatctatcagcaattccctagctaaaaaagccttggctggtaaattcaacggcaaactcatcgacactactcgcgctatcactgaagatggaagcatcgaaattgtgacacctgatcacgaagatgcccttccaatcttgcgtcactcagcagctcacttgttcgcccaagcagctcgtcgtcttttcccagacattcacttgggagttggtccagccatcgaagatggtttctactacgatactgacaacatagctggtcaaatctctaacgaagaccttcctcgtatcgaagaagaaatgcaaaaaatcgtccaagaaaactttccatctattcgtggagaagtgactaaagacgaggcacgtgaaatcttcaaaaatgacccttacaagttggaattgattgaagaacactcagaagacgaaggcggtttgactatctatcgtcagggtgaatatgtagacctctgccgtggacctcacgttccatcaacaggtcgtatccaaatcttccaccttctccatgtagctggtgcgtactggcgtggaaacagcgacaacgctatgatgcaacgtatctacggtacagcttggtttgacaagaaagacttgaaaaactaccttcaaatgcgtgaagaagctaaggaacgtgaccaccgtaaacttggtaaagagcttgacctctttatgatttcacaagaagtgggacaaggtttgccattctggttgccaaatggtgcgactatccgtcgtgaattggaacgctacatcgtaaacaaagagttggtttctggctaccaacacgtctacactccaccacttgcttctgttgagctttacaagacttctggtcactgggatcattaccaagaagacatgttcccaaccatggacatgggtgacggggaagaatttgtccttcgtccaatgaactgtccgcaccacatccaagttttcaaacaccatgttcactcttaccgtgaattgccaatccgtatcgctgaaatcggtatgatgcaccgttacgaaaaatctggtgccctcactggccttcaacgtgtacgtgaaatgtcactcaacgacggtcacctattcgttactccagaacaaatccaagaagaattccaacgtgcccttcagttgattatcgatgtttatgaagacttcaacttgactgactaccgcttccgcctctctcttcgtgaccctcaagatactcataagtactttgataacgatgagatgtgggaaaatgcccaaaccatgcttcgtgcagctcttgatgaaatgggcgtggactactttgaagccgaaggtgaagcagccttctacggaccaaaattggatatccagattaaacctgcccttggaaaagaagaaaccctttctactatccaacttgatttcttgttgccagaacgcttcgacctcaaatacatcggagctgatggcgaagatcaccgtccagtcatgatccaccgtggggttatctcaactatggaacgcttcacagctatcttgattgagaactacaagggtgccttcccaacatggctggcaccacaccaagtaaccctcatcccggtatctaacgaaaaacacgtggactacgcttgggaagtagccaagaaactccgtgaccgcggtgtccgtgcagacgtagatgagcgcaatgaaaaaatgcagttcaagatccgtgcttcacaaaccagcaagattccttaccaattaattgttggagacaaagaaatggaaggcgaaacagtcaacgttcgtcgctacggccaaaaagaaacacaaactgtctcagttgataattttgttcaagctatcctagctgatatcgccaacaaatcacgcgttgagaaataa

SEQ ID NO: 79 - protein, 660 aa, Streptococcus pneumoniae
MLRNYEIIKKENIMINITFPDGAVREFESGVTTFEIAQSISNSLAKKALAGKFNGKLIDTTRAITEDGSIEIVTPDHEDALPILRHSAAHLFAQAARRLFPDIHLGVGPAIEDGFYYDTDNIAGQISNEDLPRIEEEMQKIVQENFPSIRGEVTKDEAREIFKNDPYKLELIEEHSEDEGGLTIYRQGEYVDLCRGPHVPSTGRIQIFHLLHVAGAYWRGNSDNAMMQRIYGTAWFDKKDLKNYLQMREEAKERDHRKLGKELDLFMISQEVGQGLPFWLPNGATIRRELERYIVNKELVSGYQHVYTPPLASVELYKTSGHWDHYQEDMFPTMDMGDGEEFVLRPMNCPHHIQVFKHHVHSYRELPIRIAEIGMMHRYEKSGALTGLQRVREMSLNDGHLFVTPEQIQEEFQRALQLIIDVYEDFNLTDYRFRLSLRDPQDTHKYFDNDEMWENAQTMLRAALDEMGVDYFEAEGEAAFYGPKLDIQIKPALGKEETLSTIQLDFLLPERFDLKYIGADGEDHRPVMIHRGVISTMERFTAILIENYKGAFPTWLAPHQVTLIPVSNEKHVDYAWEVAKKLRDRGVRADVDERNEKMQFKIRASQTSKIPYQLIVGDKEMEGETVNVRRYGQKETQTVSVDNFVQAILADIANKSRVEK

SEQ ID NO: 80 - DNA, 42 bp, Streptococcus pneumoniae
gcggcggcccatatgcttagaaactatgaaataataaaaaag

SEQ ID NO: 81 - DNA, 32 bp, Streptococcus pneumoniae
gcgcggatcctttctcaacgcgtgatttgttg

SEQ ID NO: 82 - protein, 12 aa, Streptococcus pneumoniae
IQIFHLLHVAGA

SEQ ID NO: 83 - protein, 31 aa, Streptococcus pneumoniae
EFVLRPMNCPHHIQVFKHHVHSYRELPIRIA

SEQ ID NO: 84 - protein, 11 aa, Streptococcus pneumoniae
TSKIPYQLIVG

SEQ ID NO: 85 - DNA, 705 bp, Helicobacter pylori
ttggacaacactctcaaacatcttgccattattatggatggtaatggcaggtgggctaaattaaagaataaagctagggcttatggccataaaaagggcgtaaaaacccttaaagatatcacgatctggtgcgctaaccataagctagaatgcttgactttatacgctttttctacggaaaattggaaacgccctaagagtgaagtggattttttaatgaaaatgcttaaaaaataccttaaagatgagcgatccacttatttaaataataacatacgcttcagggcgataggggatttagagggcttttctaaagaattacgagatacgattttgcagcttgaaaacgataccaggcattttaaggattttacgcaagttttagcccttaattacggatctaaaaacgaactttcaagggcgtttaaaagcttgctagaaagcccgcctagccatataaaccttttagaaagtttagaaaatgaaatttctaatcgtttagacacgcatgatttgccggaagtggatttgttgttacggacagggggggaaatgcgcttgtctaattttttattgtggcagtccagctatgcggaattgtttttcacgccgattttatggcctgatttcacccctaaagatttagaaaacatcattagcgatttttacaaaagagtgcgcaaattcggggaattaaaatgctag

SEQ ID NO: 86 - protein, 234 aa, Helicobacter pylori
LDNTLKHLAIIMDGNGRWAKLKNKARAYGHKKGVKTLKDITIWCANHKLECLTLYAFSTENWKRPKSEVDFLMKMLKKYLKDERSTYLNNNIRFRAIGDLEGFSKELRDTILQLENDTRHFKDFTQVLALNYGSKNELSRAFKSLLESPPSHINLLESLENEISNRLDTHDLPEVDLLLRTGGEMRLSNFLLWQSSYAELFFTPILWPDFTPKDLENIISDFYKRVRKFGELKC

SEQ ID NO: 87 - DNA, 705 bp, Helicobacter pylori
ttggacaacactctcaaacatcttgccattattatggatggtaatggcaggtgggctaaattaaagaataaagctagggcttatgggcataaaaagggcgtaaaaacccttaaagacatcacgatctggtgcgctaaccataagctagaatgcttgactttatacgctttttctacagaaaattggaaacgccctaaaagtgaagtggattttttaatgaagatgcttaaaaaataccttaaagatgagcgatccacttacttggataataacatacgctttagggcgataggggatttagagggcttttctaaagaattgagagatacgatcttgcagcttgaaaacgataccaggcattttaaggattttacgcaagttttagcccttaattacggatctaaaaacgagctttcaagggcttttaagagcttattagaaagcccgcctagcaatataagccttttagaaagcttagaaaatgaaatttctaatcgattagacacgcgcaatttgccggaagtggatttattgttacgaacagggggggaaatgcgcttgtctaattttttattgtggcagtccagctatgcggaattgtttttcacgccgattttatggcctgatttcacccctaaagatttagaaaacatcattagcgatttttacaaaagagtgcgcaaattcggggaattaaaatgctag

SEQ ID NO: 88 - protein, 234 aa, Helicobacter pylori
LDNTLKHLAIIMDGNGRWAKLKNKARAYGHKKGVKTLKDITIWCANHKLECLTLYAFSTENWKRPKSEVDFLMKMLKKYLKDERSTYLDNNIRFRAIGDLEGFSKELRDTILQLENDTRHFKDFTQVLALNYGSKNELSRAFKSLLESPPSNISLLESLENEISNRLDTRNLPEVDLLLRTGGEMRLSNFLLWQSSYAELFFTPILWPDFTPKDLENIISDFYKRVRKFGELKC

SEQ ID NO: 89 - DNA, 34 bp, Helicobacter pylori
gcggcggcccatatggacaacactctcaaacatc

SEQ ID NO: 90 - DNA, 32 bp, Helicobacter pylori
gcgcggatccgcattttaattccccgaatttg

SEQ ID NO: 91 - protein, 19 aa, Helicobacter pylori
DITIWCANHKLECLTLYAF

SEQ ID NO: 92 - protein, 10 aa, Helicobacter pylori
DFTQVLALNY

SEQ ID NO: 93 - protein, 9 aa, Helicobacter pylori
LPEVDLLLR

SEQ ID NO: 94 - DNA, 1386 bp, Eschericia coli
atgctaaaaatcttcaatactctgacacgccaaaaagaggaatttaagcctattcacgccggggaagtcggcatgtacgtgtgtggaatcaccgtttacgatctctgtcatatcggtcacgggcgtacctttgttgcttttgacgtggttgcgcgctatctgcgtttcctcggctataaactgaagtatgtgcgcaacattaccgatatcgacgacaaaatcatcaaacgcgccaatgaaaatggcgaaagctttgtggcgatggtggatcgcatgatcgccgaaatgcacaaagattttgatgctttgaacattctgcgcccggatatggagccgcgcgcgacgcaccatatcgcagaaattattgaactcactgaacaactgatcgccaaaggtcacgcttatgtggcggacaacggcgacgtgatgttcgacgtcccgaccgatccaacttatggcgtgctgtcgcgtcaggatctcgaccagctgcaggcaggcgcgcgcgttgacgtggtcgacgacaaacgcaacccaatggacttcgttctgtggaagatgtcgaaagagggcgaaccgagctggccgtctccgtggggcgcgggtcgtcctggctggcacattgaatgttcggcaatgaactgcaagcagctgggtaaccactttgatatccacggcggcggttcagacctgatgttcccgcaccacgaaaacgaaatcgcgcagtccacctgtgcccatgatggtcagtatgtgaactactggatgcactcggggatggtgatggttgaccgcgagaagatgtccaaatcgctgggtaacttctttaccgtgcgcgatgtgctgaaatactacgacgcggaaaccgtgcgttacttcctgatgtcgggccactatcgcagccagttgaactacagcgaagagaacctgaagcaggcgcgtgcggcgctggagcgtctctacactgcgctgcgcggcacagataaaaccgttgcgcctgccggtggcgaagcgtttgaagcgcgctttattgaagcgatggacgacgatttcaacaccccggaagcctattccgtactgtttgatatggcgcgtgaagtaaaccgtctgaaagcagaagatatggcagcggcgaatgcaatggcatctcacctgcgtaaactttccgctgtattgggcctgctggagcaagaaccggaagcgttcctgcaaagcggcgcgcaggcagacgacagcgaagtggctgagattgaagcgttaattcaacagcgtctggatgcccgtaaagcgaaagactgggcggcggcggatgcggcgcgtgatcgtcttaacgagatggggatcgtgctggaagatggcccgcaagggaccacctggcgtcgtaagtaa

SEQ ID NO: 95 - protein, 461 aa, Eschericia coli [sequence omitted]

SEQ ID NO: 96 - DNA, 1386 bp, Eschericia coli
atgctaaaaatcttcaatactctgacacgccaaaaagaggaatttaagcctattcacgccggggaagtcggcatgtacgtgtgtggaatcaccgtttacgatctctgtcatatcggtcacgggcgtacctttgttgcttttgacgtggttgcgcgctatctgcgtttcctcggctataaactgaagtatgtgcgcaacattaccgatatcgacgacaaaatcatcaaacgcgccaatgaaaatggcgaaacgtttgtggcgatggtggatcgcatgatcgccgaaatgcacaaagattttgatgctttgaacattctgcgcccggatatggagccgcgcgcgacgcaccatatcgcagaaattattgaactcactgaacaactgatcgccaaaggtcacgcttatgtggcggacaacggcgacgtgatgttcgacgtcccgaccgatccaacttatggcgtgctgtcgcgtcaggatctcgaccagctgcaggcaggcgcgcgcgttgacgtggtcgacgacaaacgcaacccaatggacttcgttctgtggaagatgtcgaaagagggcgaaccgagctggccgtctccgtggggcgcgggtcgtcctggctggcacattgaatgttcggcaatgaactgcaagcagctgggtaaccactttgatatccacggcggcggttcagacctgatgttcccgcaccacgaaaacgaaatcgcgcagtccacctgtgcccatgatggtcagtatgtgaactactggatgcactcggggatggtgatggttgaccgcgagaagatgtccaaatcgctgggtaacttctttaccgtgcgcgatgtgctgaaatactacgacgcggaacccgtgcgttacttcctgatgtcgggccactatcgcagccagttgaactacagcgaagagaacctgaagcaggcgcgtgcggcgctggagcgtctctacactgcgctgcgcggcacagataaaaccgttgcgcctgccggtggcgaagcgtttgaagcgcgctttattgaagcgatggacgacgatttcaacaccccggaagcctattccgtactgtttgatatggcgcgtgaagtaaaccgtctgaaagcagaagatatggcagcggcgaatgcaatggcatctcacctgcgtaaactttccgctgtattgggcctgctggagcaagaaccggaagcgttcctgcaaagcggcgcgcaggcagacgacagcgaagtggctgagattgaagcgttaattcaacagcgtctggatgcccgtaaagcgaaagactgggcggcggcggatgcggcgcgtgatcgtcttaacgagatggggatcgtgctggaagatggcccgcaagggaccacctggcgtcgtaagtaa

SEQ ID NO: 97 - protein, 461 aa, Eschericia coli
MLKIFNTLTRQKEEFKPIHAGEVGMYVCGITVYDLCHIGHGRTFVAFDVVARYLRFLGYKLKYVRNITDIDDKIIKRANENGETFVAMVDRMIAEMHKDFDALNILRPDMEPRATHHIAEIIELTEQLIAKGHAYVADNGDVMFDVPTDPTYGVLSRQDLDQLQAGARVDVVDDKRNPMDFVLWKMSKEGEPSWPSPWGAGRPGWHIECSAMNCKQLGNHFDIHGGGSDLMFPHHENEIAQSTCAHDGQYVNYWMHSGMVMVDREKMSKSLGNFFTVRDVLKYYDAEPVRYFLMSGHYRSQLNYSEENLKQARAALERLYTALRGTDKTVAPAGGEAFEARFIEAMDDDFNTPEAYSVLFDMAREVNRLKAEDMAAANAMASHLRKLSAVLGLLEQEPEAFLQSGAQADDSEVAEIEALIQQRLDARKAKDWAAADAARDRLNEMGIVLEDGPQGTTWRRK

SEQ ID NO: 98 - DNA, 36 bp, Eschericia coli
gcggcggcccatatgctaaaaatcttcaatactctg

SEQ ID NO: 99 - DNA, 29 bp, Eschericia coli
gcgcggatcccttacgacgccaggtggtc

SEQ ID NO: 100 - protein, 17 aa, Eschericia coli
VGMYVCGITVYDLCHIG

SEQ ID NO: 101 - protein, 26 aa, Eschericia coli
RTFVAFDVVARYLRFLGYKLKYVRNI

SEQ ID NO: 102 - protein, 16 aa, Eschericia coli
ASHLRKLSAVLGLLEQ

SEQ ID NO: 103 - DNA, 1125 bp, Helicobacter pylori
atgaaaatcagtgttagtaaaaacgatttagaaaatgctttgcgctacttgcaagcttttttggataaaaaggacgcttcttctatcgcttcacacatccatttagaagtcattaaagaaaagctttttttaaaagccagcgattccgatattgggctaaaaagctatatttttacgcaatctagcgataaagagggcgtaggcacgatcaacgggaaaaagtttttggatattatctcatgtttaaaagactccaatattattttagaaactaaagatgatagcttggcgatcaaacaaaataaaagctctttcaaactccccatgtttgacgctgatgagttccctgaattccctgttattgatcccaaagtgagtatagaagtcaatgccccttttttggtagatgcgtttaaaaagatcgctcctgtgattgagcaaaccagccacaaaagggaattagccggtattttaatgcaatttgatcaaaaacatcaaaccctttcggtggtaggcacggataccaaacggctttcttacacgcagttagaaaaaatctctatccattccactgaagaagacatctcttgcattttacctaaaagagctttattagaaatccttaagcttttttatgaaaatttcagttttaaaagcgatggcatgttagcggtaattgaaaacgaaatgcacacttttttcaccaaactcattgatgggaattaccctgattatcaaaaaatcctccctaaagaatacatttcttctttcactttaggcaaggaagaatttaaagagagcattaaattgtgcagttctttaagctccaccattaaactcactttagaaaaaaacaacgctttgtttgaatctttggattctgagcatagcgaaacggctaaaacctctgttgagattgaaaaaggtttggatattgaaaaagcctttcatttgggcgtgaacgctaaatttttccttgaagccttaaacgctttagggacaacgcaattcgttttaagatgcaatgagccttcttcgccttttttgattcaagagtctcttgatgaaaagcaaagccacttgaacgctaaaatttccactttgatgatgccaatcacactataa

SEQ ID NO: 104 - protein, 374 aa, Helicobacter pylori
MKISVSKNDLENALRYLQAFLDKKDASSIASHIHLEVIKEKLFLKASDSDIGLKSYIFTQSSDKEGVGTINGKKFLDIISCLKDSNIILETKDDSLAIKQNKSSFKLPMFDADEFPEFPVIDPKVSIEVNAPFLVDAFKKIAPVIEQTSHKRELAGILMQFDQKHQTLSVVGTDTKRLSYTQLEKISIHSTEEDISCILPKRALLEILKLFYENFSFKSDGMLAVIENEMHTFFTKLIDGNYPDYQKILPKEYISSFTLGKEEFKESIKLCSSLSSTIKLTLEKNNALFESLDSEHSETAKTSVEIEKGLDIEKAFHLGVNAKFFLEALNALGTTQFVLRCNEPSSPFLIQESLDEKQSHLNAKISTLMMPITL

SEQ ID NO: 105 - DNA, 1125 bp, Helicobacter pylori
atgaaaatcagtgttagtaaaaacgatttagaaaatgctttgcgctacttgcaagcttttttggataaaaaggacgcttcttctatcgcttcacacatccatttagaagtcattaaagaaaagctttttttaaaagccagcgattcagatattgggctaaaaagctatatttttacgcaatctagcgataaagagggcgttggcacgatcaacgggaaaaagtttttggatattatctcatgtttaaaagactctaacattgttttagagactaaagatgacagcttggtgatcaaacaaaataaaagctctttcaaactccccatgtttgacgctgatgagttccctgaattccctgttatagatcccaaagtgagtttggaagtcaatgccccctttttaacagatgcgtttaaaaagatcgctcctgtgattgagcaaaccagccataaaagggaattagccggtattttaatgcaatttgatcaaaaacatcaaaccctttcagtagtaggcacggataccaaacggctctcttacacgcagttagaaaaagtctctatccattccactgaagaagacatctcttgtattttacctaaaagagctttattagaaatccttaagcttttttatgaaaatttcagttttaaaagcgatggcatgttagcggtaattgaaaacgaaacgcacacttttttcaccaagcttattgatgggaattaccctgattatcaaaaaatcctccctaaagaatacacttcttctttcactttatgcaaggaagaatttaaagagagcattaaattgtgcagttctttaagctccaccattaaactcactttagaaaaaaacaacgctttgtttgaatctttggattctgagcatagcgaaacggctaaaacctctgttgagattgaaaaaggtttggatattgaaaaagcctttcatttgggcgtgaacgctaaatttttccttgaagccttaaacgctttagggacaacgcaattcgttttaaaatgcaatgagccttcttcgccttttttgatccaagagcctcttgatgaaaagcaaagccacttgaacgctaaaatttccactttgatgatgccaatcacactataa

SEQ ID NO: 106 - protein, 374 aa, Helicobacter pylori
MKISVSKNDLENALRYLQAFLDKKDASSIASHIHLEVIKEKLFLKASDSDIGLKSYIFTQSSDKEGVGTINGKKFLDIISCLKDSNIVLETKDDSLVIKQNKSSFKLPMFDADEFPEFPVIDPKVSLEVNAPFLTDAFKKIAPVIEQTSHKRELAGILMQFDQKHQTLSVVGTDTKRLSYTQLEKVSIHSTEEDISCILPKRALLEILKLFYENFSFKSDGMLAVIENETHTFFTKLIDGNYPDYQKILPKEYTSSFTLCKEEFKESIKLCSSLSSTIKLTLEKNNALFESLDSEHSETAKTSVEIEKGLDIEKAFHLGVNAKFFLEALNALGTTQFVLKCNEPSSPFLIQEPLDEKQSHLNAKISTLMMPITL

SEQ ID NO: 107 - DNA, 36 bp, Helicobacter pylori
gcggcggcccatatgaaaatcagtgttagtaaaaac

SEQ ID NO: 108 - DNA, 33 bp, Helicobacter pylori
gcgcggatcctagtgtgattggcatcatcaaag

SEQ ID NO: 109 - protein, 16 aa, Helicobacter pylori
FLDIISCLKDSNIILE

SEQ ID NO: 110 - protein, 9 aa, Helicobacter pylori
HQTLSVVGT

SEQ ID NO: 111 - protein, 15 aa, Helicobacter pylori
SIKLCSSLSSTIKLT

SEQ ID NO: 112 - DNA, 1245 bp, Streptococcus pneumoniae
gtgaaaagaatgaaactaaatcgagtagtggtaacaggttatggagtaacatctccaatcggaaatacaccagaagaattttggaatagtttagcaactgggaaaatcggcattggtggcattacaaaatttgatcatagtgactttgatgtgcataatgcggcagaaatccaagattttccgttcgataaatactttgtaaaaaaagataccaaccgttttgataactattctttatatgccttgtatgcagcccaagaggctgtaaatcatgccaatcttgatgtagaggctcttaatagggatcgttttggtgttatcgttgcatctggtattggtggaatcaaggaaattgaagatcaggtacttcgccttcatgaaaaaggacccaaacgtgtcaaaccaatgactcttccaaaagctttaccaaatatggcttctgggaatgtagccatgcgttttggtgcaaacggtgtttgtaaatctatcaatactgcctgctcttcatcaaatgatgcgattggggatgccttccgctccattaagtttggtttccaagatgtgatgttggtgggaggaacagaagcttctatcacaccttttgccatcgctggtttccaagccttaacagctctctctactacagaggatccaactcgtgcttcgatcccatttgataaggatcgcaatgggtttgttatgggtgaaggttcagggatgttggttctagaaagtcttgaacacgctgaaaaacgtggagctactatcctggctgaagtggttggttacggaaatacttgtgatgcctaccacatgacttctccacatccagaaggtcagggagctatcaaggccatcaaactagccttggaagaagctgagatttctccagagcaagtagcctatgtcaatgctcacggaacgtcaactcctgccaatgaaaaaggagaaagtggtgctatcgtagctgttcttggtaaggaagtacctgtatcatcaaccaagtcttttacaggacatttgctgggggctgcgggtgcagtagaagctatcgtcaccatcgaagctatgcgtcataactttgtaccaatgacagctgggacaagtgaagtatcagattatatcgaagctaatgtcgtttatggacaaggcttggagaaagaaattccatacgctatttcaaatacttttggttttggaggccacaatgcagttcttgctttcaaacgttgggagaatagataa

SEQ ID NO: 113 - protein, 414 aa, Streptococcus pneumoniae
VKRMKLNRVVVTGYGVTSPIGNTPEEFWNSLATGKIGIGGITKFDHSDFDVHNAAEIQDFPFDKYFVKKDTNRFDNYSLYALYAAQEAVNHANLDVEALNRDRFGVIVASGIGGIKEIEDQVLRLHEKGPKRVKPMTLPKALPNMASGNVAMRFGANGVCKSINTACSSSNDAIGDAFRSIKFGFQDVMLVGGTEASITPFAIAGFQALTALSTTEDPTRASIPFDKDRNGFVMGEGSGMLVLESLEHAEKRGATILAEVVGYGNTCDAYHMTSPHPEGQGAIKAIKLALEEAEISPEQVAYVNAHGTSTPANEKGESGAIVAVLGKEVPVSSTKSFTGHLLGAAGAVEAIVTIEAMRHNFVPMTAGTSEVSDYIEANVVYGQGLEKEIPYAISNTFGFGGHNAVLAFKRWENR

SEQ ID NO: 114 - DNA, 1245 bp, Streptococcus pneumoniae
gtgaaaagaatgaaactaaatcgagtagtggtaacaggttatggagtaacatctccaatcggaaatacaccagaagaattttggaatagtttagcaactgggaaaatcggcattggtggcattacaaaatttgatcatagtgactttgatgtgcataatgcggcagaaatccaagattttccgttcgataaatactttgtaaaaaaagataccaaccgttttgataactattctttatatgccttgtatgcagcccaagaggctgtaaatcatgccaatcttgatgtagaggctcttaatagggatcgttttggtgttatcgttgcatctggtattggtggaatcaaggaaattgaagatcaggtacttcgccttcatgaaaaaggacccaaacgtgtcaaaccaatgactcttccaaaagctttaccaaatatggcttctgggaatgtagccatgcgttttggtgcaaacggtgtttgtaaatctatcaatactgcctgctcttcatcaaatgatgcgattggggatgccttccgctccattaagtttggtttccaagatgtgatgttggtgggaggaacagaagcttctatcacaccttttgccatcgctggtttccaagccttaacagctctctctactacagaggatccaactcgtgcttcgatcccatttgataaggatcgcaatgggtttgttatgggtgaaggttcagggatgttggttttagaaagtcttgaacacgctgaaaaacgtggagctactatcctggctgaagtggttggttacggaaatacttgtgatgcctaccacatgacttctccacatccagaaggtcagggagctatcaaggccatcaaactagccttggaagaagctgagatttctccagagcaagtagcctatgtcaatgctcacggaacgtcaactcctgccaatgaaaaaggagaaagtggagctatcgtagctgttcttggtaaggaagtacctgtatcatcaaccaagtcttttacaggacatttgctgggggctgcgggtgcagtagaagctatcgtcaccatcgaagctatgcgccataactttgtaccaatgacagctgggacaagtgaagtatcagattatatcgaagctaatgtcgtttatggacaaggcttggagaaagaaattccatacgctatttcaaatacttttggttttggaggccacaatgcagttcttgctttcaaacgttgggagaatagataa

SEQ ID NO: 115 - protein, 414 aa, Streptococcus pneumoniae; identical to SEQ ID NO: 113

SEQ ID NO: 116 - DNA, 35 bp, Streptococcus pneumoniae
gcggcggcccatatgaaaagaatgaaactaaatcg

SEQ ID NO: 117 - DNA, 33 bp, Streptococcus pneumoniae
gcgcagatcttctattctcccaacgtttgaaag

SEQ ID NO: 118 - protein, 16 aa, Streptococcus pneumoniae
GAIVAVLGKEVPVSST

SEQ ID NO: 119 - protein, 24 aa, Streptococcus pneumoniae
NYSLYALYAAQEAVNHANLDVEAL

SEQ ID NO: 120 - protein, 9 aa, Streptococcus pneumoniae
FGVIVASGI

SEQ ID NO: 121 - DNA, 762 bp, Helicobacter pylori
atggcaatctctattaaaagcccaaaagaaatcaaagctctaagaaaagccggggaattaaccgctcaagcgttagcccttttagagcgagaagtaaggcctggggtttcacttttagagctggataaaatggctgaagattttatcaaatcctctcatgccaggcctgcttttaaggggctgtatggatttcctaactctgtgtgcatgtccttaaatgaggtggttattcatggcattcctacggattatgttttacaagaaggggatattataggcttggatttgggggtggaggtggatggctattatggcgattcagccctcacgcttcctataggtgcgataagcccgcaagatgaaaaattgctcgcttgctctaaagagagcttgatgcatgccattaattcaattagagtgggcatgcattttaaagagttgagtcagattttagagagcactattacagaaaggggctttgtgcctttgaaaggattttgcgggcatggcattggtaaaaaaccccatgaagagccagagatccccaactacctagaaaaaggcgtcaaacctaatagcggccctaaaatcaaagagggcatggtattttgcttagagcctatggtgtgtcaaaaacagggcgagcctaaaatactagcggataagtggagcgtggtttcagtggatgggcttaacacaagccaccatgagcatactatcgccatagttggcaataaagcagtgattcttacggagcgttaa

SEQ ID NO: 122 - protein, 253 aa, Helicobacter pylori
MAISIKSPKEIKALRKAGELTAQALALLEREVRPGVSLLELDKMAEDFIKSSHARPAFKGLYGFPNSVCMSLNEVVIHGIPTDYVLQEGDIIGLDLGVEVDGYYGDSALTLPIGAISPQDEKLLACSKESLMHAINSIRVGMHFKELSQILESTITERGFVPLKGFCGHGIGKKPHEEPEIPNYLEKGVKPNSGPKIKEGMVFCLEPMVCQKQGEPKILADKWSVVSVDGLNTSHHEHTIAIVGNKAVILTER

SEQ ID NO: 123 - DNA, 762 bp, Helicobacter pylori
atggcaatctctattaaaagcccaaaagaaatcaaagctctaagaaaagccggggaattaaccgctcaagcgttagcccttttagagcgagaagtaaggcctggggtttcacttttagagctggataaaatggctgaagattttatcaaattctctcatgccaggcctgcttttaaggggctttatggtttccctaactcggtgtgcatgtccttaaatgaggtggttattcatggcattcctacggattatgttttacaagaaggggatattataggcttggatttgggggtggaggtggatggctattatggcgattcggccctcacgcttcccataggcgcgataagcccgcaagatgaaaaattgctcgcttgctctaaagagagcttgatgcatgccattaattccattagagtgggcatgcattttaaagagttgagtcagattttagagagcgctattacagaaaggggctttgtgcctttgaaaggattttgtgggcatggcattggtaaaaaaccccatgaagagccagaaatccccaactacctagaaaaaggcgtcaaggctaatagcggccctaaaatcaaagagggcatggtattttgcttagagcctatggtgtgtcaaaaacaaggcgagcctaaaatactagcggataagtggagcgtggtttcagtggatgggcttaacacaagccaccatgagcatactatcgccatagttggcaataaagcagtgattcttacggagcgttaa

SEQ ID NO: 124 - protein, 253 aa, Helicobacter pylori
MAISIKSPKEIKALRKAGELTAQALALLEREVRPGVSLLELDKMAEDFIKFSHARPAFKGLYGFPNSVCMSLNEVVIHGIPTDYVLQEGDIIGLDLGVEVDGYYGDSALTLPIGAISPQDEKLLACSKESLMHAINSIRVGMHFKELSQILESAITERGFVPLKGFCGHGIGKKPHEEPEIPNYLEKGVKANSGPKIKEGMVFCLEPMVCQKQGEPKILADKWSVVSVDGLNTSHHEHTIAIVGNKAVILTER

SEQ ID NO: 125 - DNA, 34 bp, Helicobacter pylori
gcggcggcccatatggcaatctctattaaaagcc

SEQ ID NO: 126 - DNA, 30 bp, Helicobacter pylori
gcgcggatccacgctccgtaagaatcactg

SEQ ID NO: 127 - protein, 14 aa, Helicobacter pylori
GMVFCLEPMVCQKQ

SEQ ID NO: 128 - protein, 16 aa, Helicobacter pylori
PKILADKWSVVSVDGL

SEQ ID NO: 129 - protein, 32 aa, Helicobacter pylori
FKGLYGFPNSVCMSLNEVVIHGIPTDYVLQEG

SEQ ID NO: 130 - DNA, 1506 bp, Streptococcus pneumoniae
atgaacaaacgtgtaaaaatcgttgcaactttgggtcctgcggtagaaatccgtggtggtaaaaaattcggtgaggacggatactggggtgaaaaacttgatgttgaagcttcagctaaaaacattgctaaattgattgaagctggtgctaacacattccgattcaacttctcacacggcgaccaccaagaacaaggtgagcgtatggcaactgttaaacttgcggaaaaaattgcaggtaaaaaagttggtttccttcttgatacaaaaggacctgaaatccgtacagaattgttcgaaggtgaagctaaagaatattcatacaaaactggtgaaaaaattcgtgttgcaactaaacaaggaatcaaatcaactcgtgaagtgattgcgttgaacgttgctggtgctcttgatatctatgatgatgttgaagttggtcgtcaagttttggttgacgatggtaaacttggtcttcgtgtggttgctaaagatgatgcaactcgtgaatttgaagttgaagttgaaaacgatggtatcatcgctaaacaaaaaggtgtgaacatccctaacactaaaattcctttcccagctcttgctgaacgcgataacgacgatatccgtttcggtcttgaacaaggtatcaacttcatcgcaatttcattcgtacgtactgcaaaagatgtgaacgaagttcgtgcaatctgtgaagaaactggaaacggacatgttcaattgttcgctaaaatcgaaaaccaacaaggtatcgataacttagatgaaatcatcgaagcagctgatggtattatgattgctcgtggtgatatgggtatcgaagtaccgttcgaaatggttccagtttatcaaaaaatgattatcaagaaagtcaatgctgcaggtaaagttgttatcactgcaacaaacatgcttgaaacaatgactgaaaaaccacgtgcaactcgttcagaagtatcagatgtattcaacgctgttatcgacggaactgacgctacaatgttgtcaggcgagtctgcaaacggtaaatacccactcgagtcagtaactacaatggctacaatcgacaagaacgctcaagctcttcttaatgaatacggacgtcttgattcagattcatttgagcgtaactctaagacagaagtaatggcttctgctgttaaagatgctactagctcaatggatatcaaattggttgtaactcttactaagacaggtcatactgcacgtttgatttctaaataccgtccaaatgctgacatcttagcattgacatttgacgaattgacagaacgtggcttgatgttgaactggggtgttatcccaatgttgacagatgctccatcttcaactgacgatatgttcgaaatcgctgaacgtaaagcggtagaagcaggtctcgttgagtcaggcgatgatatcgttatcgttgctggtgtgccagtaggagaagctgttcgcacaaacacaatgcgtatccgcacagtacgttaa

SEQ ID NO: 131 - protein, 501 aa, Streptococcus pneumoniae
MNKRVKIVATLGPAVEIRGGKKFGEDGYWGEKLDVEASAKNIAKLIEAGANTFRFNFSHGDHQEQGERMATVKLAEKIAGKKVGFLLDTKGPEIRTELFEGEAKEYSYKTGEKIRVATKQGIKSTREVIALNVAGALDIYDDVEVGRQVLVDDGKLGLRVVAKDDATREFEVEVENDGIIAKQKGVNIPNTKIPFPALAERDNDDIRFGLEQGINFIAISFVRTAKDVNEVRAICEETGNGHVQLFAKIENQQGIDNLDEIIEAADGIMIARGDMGIEVPFEMVPVYQKMIIKKVNAAGKVVITATNMLETMTEKPRATRSEVSDVFNAVIDGTDATMLSGESANGKYPLESVTTMATIDKNAQALLNEYGRLDSDSFERNSKTEVMASAVKDATSSMDIKLVVTLTKTGHTARLISKYRPNADILALTFDELTERGLMLNWGVIPMLTDAPSSTDDMFEIAERKAVEAGLVESGDDIVIVAGVPVGEAVRTNTMRIRTVR

SEQ ID NO: 132 - DNA, 1506 bp, Streptococcus pneumoniae
atgaacaaacgtgtaaaaatcgttgcaactttgggtcctgcggtagaaatccgtggtggtaaaaaattcggtgaggacggatactggggtgaaaaacttgatgttgaagcttcagctaaaaacattgctaaattgattgaagctggtgctaacacattccgattcaacttctcacacggcgaccatcaagaacaaggtgagcgtatggcaactgttaaacttgcggaaaaaattgcaggtaaaaaagttggtttccttcttgatacaaaaggacctgaaatccgtacagaattgttcgaaggtgaagctaaagaatattcatacaaaactggtgaaaaaattcgtgttgcaactaaacaaggaatcaaatcaactcgtgaagtgattgcgttgaacgttgctggtgctcttgatatctatgatgatgttgaagttggtcgtcaagttttggttgacgatggtaaacttggtcttcgtgtggttgctaaagatgatgcaactcgtgaatttgaagttgaagttgaaaacgatggtatcatcgctaaacaaaaaggtgtgaacatccctaacactaaaattcctttcccagctcttgctgaacgcgataacgacgatatccgtttcggtcttgaacaaggtatcaacttcatcgcaatttcattcgtacgtactgcaaaagatgtgaacgaagttcgtgcaatctgtgaagaaactggaaacggacatgttcaattgttcgctaaaatcgaaaaccaacaaggtatcgataacttagatgaaatcatcgaagcagctgatggtattatgattgctcgtggtgatatgggtatcgaagtaccgttcgaaatggttccagtttatcaaaaaatgattatcaagaaagtcaatgctgcaggtaaagttgttatcactgcaacaaacatgcttgaaacaatgactgaaaaaccacgtgcaactcgttcagaagtatcagacgtattcaacgctgttatcgacggaactgacgctacaatgctgtcaggcgagtctgcaaacggtaaatacccactcgagtcagtaactacaatggctacaatcgacaagaacgctcaagctcttcttaatgaatacggacgtcttgattcagattcatttgagcgtaactctaagacagaagtaatggcttctgctgttaaagatgctactagctcaatggatatcaaattggttgtaactcttactaagacaggtcatactgcacgtttgatttctaaataccgtccaaatgctgacatcttagcattgacatttgacgaattgacagaacgtggcttgatgttgaactggggtgttatcccaatgttgacagatgctccatcttcaactgacgatatgttcgaaatcgctgaacgtaaagcggtagaagcaggtctcgttgagtcaggcgatgatatcgttatcgttgctggtgtgccagtaggagaagctgttcgcacaaacacaatgcgtatccgcacagtacgttaa

SEQ ID NO: 133 - protein, 501 aa, Streptococcus pneumoniae; identical to SEQ ID NO: 131

SEQ ID NO: 134 - DNA, 34 bp, Streptococcus pneumoniae
gcggcggcccatatgaacaaacgtgtaaaaatcg

SEQ ID NO: 135 - DNA, 29 bp, Streptococcus pneumoniae
gcgcggatccacgtactgtgcggatacgc

SEQ ID NO: 136 - protein, 26 aa, Streptococcus pneumoniae
RKAVEAGLVESGDDIVIVAGVPVGEA

SEQ ID NO: 137 - protein, 9 aa, Streptococcus pneumoniae
DIKLVVTLT

SEQ ID NO: 138 - protein, 30 aa, Streptococcus pneumoniae
TREVIALNVAGALDIYDDVEVGRQVLVDDG

SEQ ID NO: 139 - DNA, 1839 bp, Helicobacter pylori
atgagtgcggaactgattgctgtttataaagacgagcaaataatagatttagagagcgcgaaagtcttagggctgagcgatgggattaaagcgttaaacgggacagagccgatatattttgatgattcgcctttggctttagaggtgattaggcattcatgcgcgcatttgcttgcgcaaagcttgaaagccctttatccggacgcgaaattttttgtaggccctgtggtagaagaggggttttattacgatttcaagacttcttcaaaaatcagcgaagaggatttgcctaaaattgaagcgaaaatgaaagagtttgcgaagttgaaactcgctatcactaaagagactttaaccagagagcaagctttggagcgttttaagggcgatgaattaaagcatgcggtgatgagtaaaatcggtggcgatgcctttggcgtgtatcaacaaggcgagtttgaagatttgtgtaaggggccgcatctcccaaacacccgttttttaaaccattttaagctcactaaactggctggggcttatttgggcggcgatgaaaacaatgaaatgctcattagaatctatggaatcgcttttgccaccaaagagggtttaaaagactatcttttccaaatagaagaagcgaaaaaacgagatcacagaaagctaggcgtggagctagggctttttagctttgatgatgagataggggcgggcttacctttatggctgcctaaaggggcaaggcttaggaagcgcattgaagatttattgagtcaagcgttacttttaagaggctatgagccggttaaaggtcctgagattttaaagagcgatgtgtggaaaatcagcgggcattatgacaactataaagaaaacatgtatttcaccacgattgatgagcaagaatatggcataaagcctatgaactgcgtggggcatattaaagtctatcaaagcgctttgcacagctacagagatttgcccttaaggttttatgaatacggcgtggtgcatcggcatgaaaaaagcggcgtgttgcatgggcttttaagggttagggaatttacccaagatgatgcacatattttttgctcttttgaacagatccaaagcgaagtgagcgcgattttagattttacgcacaaaatcatgcaagcgtttgattttagctatgaaatggaattatccacaaggccggctaaatccataggcgatgataaagtttgggaaaaggccactaacgctttaaaagaagccttaaaagaacaccgcattgattacaagattgatgaagggggaggggctttctatgggcctaagattgacattaaaatcactgacgctttaaagcgtaaatggcagtgtggcacgattcaagtggatatgaatttgcctgaacgcttcaagctcgctttcactaatgagtataatcacgctgagcagccggtgatgatccacagagcgattttaggctcgtttgaaaggtttattgcgattttgagcgaacattttggggggaatttccctttctttgtcgcgcccactcaaatcgctctcatccctattaatgaagagcatcatgtttttgctttgaaattaaaagaggcgctaaaaaagcgcgatatttttgtagaagtgttagataaaaacgacagcttgaataaaaaggtgcgattagccgaaaagcaaaaaatccctatgattttagtgttagggaatgaagaagtggagaccgaaattttatccattagagacagagaaaaacaagatcaatataaaatgcccttaaaggagtttttaaacatggttgaatctaagatgcaagaggttagtttttga

SEQ ID NO: 140 - protein, 612 aa, Helicobacter pylori
MSAELIAVYKDEQIIDLESAKVLGLSDGIKALNGTEPIYFDDSPLALEVIRHSCAHLLAQSLKALYPDAKFFVGPVVEEGFYYDFKTSSKISEEDLPKIEAKMKEFAKLKLAITKETLTREQALERFKGDELKHAVMSKIGGDAFGVYQQGEFEDLCKGPHLPNTRFLNHFKLTKLAGAYLGGDENNEMLIRIYGIAFATKEGLKDYLFQIEEAKKRDHRKLGVELGLFSFDDEIGAGLPLWLPKGARLRKRIEDLLSQALLLRGYEPVKGPEILKSDVWKISGHYDNYKENMYFTTIDEQEYGIKPMNCVGHIKVYQSALHSYRDLPLRFYEYGVVHRHEKSGVLHGLLRVREFTQDDAHIFCSFEQIQSEVSAILDFTHKIMQAFDFSYEMELSTRPAKSIGDDKVWEKATNALKEALKEHRIDYKIDEGGGAFYGPKIDIKITDALKRKWQCGTIQVDMNLPERFKLAFTNEYNHAEQPVMIHRAILGSFERFIAILSEHFGGNFPFFVAPTQIALIPINEEHHVFALKLKEALKKRDIFVEVLDKNDSLNKKVRLAEKQKIPMILVLGNEEVETEILSIRDREKQDQYKMPLKEFLNMVESKMQEVSF

SEQ ID NO: 141 - DNA, 1839 bp, Helicobacter pylori
atgagtgcggaactgattgctgtttataaagacgagcaaataatagatttagagagcgcgaaagtcttagggctgagcgatgggattaaagcgttaaaagggacagagccgatatattttgatgattcgcctttggctttagaagtgatcaggcattcgtgtgcacatttgctcgcacaaagcttgaaagccctttatccggacgcgaaattttttgtaggccctgtggtagaagaaggattttattacgatttcaagaccgcttcaaaaatcagcgaagaggatttgcctaaaattgaagcgaaaatgaaagaatttgcgaagtcaaagctcgctatcactaaagagactttaaccagagagcaagctttggagcgttttaagggcgatgaattaaagcatgcggtgatgagtaaaatcagtggcgataaatttggcgtgtaccaacaaggcgagtttgaagatttgtgtaaggggcctcacctcccaaacacccgttttttaaaccattttaagctcactaaactggctggggcttatttgggcggcgatgaaaacaatgaaatgctcattagaatctatggaatcgcttttgccaccaaagagggtttaaaagactatcttttccaaatagaagaagcgaaaaaacgagatcacagaaagctaggcgtggagctagggctttttagctttgatgatgagataggggcgggcttacctttatggctgcctaaaggggcaaggcttaggaagcgcattgaagatttattgagtcaagcgttacttttaagaggctatgagccggttaaaggtcctgagattttaaagagcgatgtgtggaaaatcagcgggcattatgacaactataaagaaaacatgtatttcaccacgattgatgagcaagaatatggcataaagcctatgaactgcgtggggcatattaaagtctatcaaagcgctttgcacagctacagagatttgcccttaaggttttatgaatacggcgtggtgcatcggcatgaaaaaagcggcgtgttgcatgggcttttaagggttagggaatttacccaagatgatgcacatattttttgctcttttgaacagatccaaagcgaagtgagcgcgattttagattttacgcacaaaatcatgcaagcgtttgattttagctatgaaatggaattatccacaaggccggctaaatccataggcgatgataaagtttgggaaaaggccactaacgctttaaaagaagccttaaaagaacaccgcattgattacaagattgatgaagggggaggggctttctatgggcctaagattgacattaaaatcactgacgctttaaagcgtaaatggcagtgtggcacgattcaagtggatatgattttgcctgaacgcttcaagctcgctttcattaatgagcataatcacgctgaacagccagtgatgatccacagagcgattttaggctcgtttgaaaggtttattgcgattttgagcgaacattttggggggaatttccctttctttgtcgcgcccactcaaatcgctctcatccctattaatgaagagcatcatgtttttgctttgaaattaaaagaggaactaaaaaagcgcgatatttttgtagaagtgctggataaaaacgacagcttgaataaaaaagtgcgattagccgaaaagcaaaaaatccctatgattttagtgttagggaatgaagaagtggagaccgaaattttatccattagagacagagaaaaacaagctcaatataaaatgcccttaaaggagtttttaaacatggttgaatctaagatgcaagaggttagtttttga

SEQ ID NO: 142 - protein, 612 aa, Helicobacter pylori
MSAELIAVYKDEQIIDLESAKVLGLSDGIKALKGTEPIYFDDSPLALEVIRHSCAHLLAQSLKALYPDAKFFVGPVVEEGFYYDFKTASKISEEDLPKIEAKMKEFAKSKLAITKETLTREQALERFKGDELKHAVMSKISGDKFGVYQQGEFEDLCKGPHLPNTRFLNHFKLTKLAGAYLGGDENNEMLIRIYGIAFATKEGLKDYLFQIEEAKKRDHRKLGVELGLFSFDDEIGAGLPLWLPKGARLRKRIEDLLSQALLLRGYEPVKGPEILKSDVWKISGHYDNYKENMYFTTIDEQEYGIKPMNCVGHIKVYQSALHSYRDLPLRFYEYGVVHRHEKSGVLHGLLRVREFTQDDAHIFCSFEQIQSEVSAILDFTHKIMQAFDFSYEMELSTRPAKSIGDDKVWEKATNALKEALKEHRIDYKIDEGGGAFYGPKIDIKITDALKRKWQCGTIQVDMILPERFKLAFINEHNHAEQPVMIHRAILGSFERFIAILSEHFGGNFPFFVAPTQIALIPINEEHHVFALKLKEELKKRDIFVEVLDKNDSLNKKVRLAEKQKIPMILVLGNEEVETEILSIRDREKQAQYKMPLKEFLNMVESKMQEVSF

SEQ ID NO: 143 - DNA, 32 bp, Helicobacter pylori
gcggcggcccatatgagtgcggaactgattgc

SEQ ID NO: 144 - DNA, 33 bp, Helicobacter pylori
gcgcggatccaaaactaacctcttgcatcttag

SEQ ID NO: 145 - protein, 44 aa, Helicobacter pylori
PIYFDDSPLALEVIRHSCAHLLAQSLKALYPDAKFFVGPVVEEG

SEQ ID NO: 146 - protein, 34 aa, Helicobacter pylori
PMNCVGHIKVYQSALHSYRDLPLRFYEYGVVHRH

SEQ ID NO: 147 - protein, 31 aa, Helicobacter pylori
EDLLSQALLLRGYEPVKGPEILKSDVWKISG

SEQ ID NO: 148 - DNA, 684 bp, Pseudomonas aeruginosa
atgaatgacaagtcggtgctgagttgccgcaacctgagcaagagctacgacgaggggccgcaatcggtgcaggtgctgtccggcgtcgagttgaacctgctgcctggggagcgggtggctatcgtcggcagctccggttcgggcaagagcaccttgctgaacatgctcggcggcctggacacgccctccgccggcagcgtctggctcgccggcgaggaactctcggcgctgaacgagacggcccgcgggctgctgcgcaaccgcgcgctgggcttcgtctaccagttccaccacctgttgccggagttcaccgccctggagaacgtctgcatgccgctgttgatcggccgcacgccgatcgcggaagcccgccagcgggcggccgagctgctggagcgggtcgggctggggcatcgcctgtcgcacaagccggccgagctgtccggcggcgagcgccagcgggtggcgatcgcccgcgcgctggtcaaccgtccgcagctggtactgctcgacgagcccaccggcaacctcgaccagcataccgcccagggtatccaggagctgatgctggaactgagccgttcgttgcagacctcgttcctggtggtaacccacgatctccagctggccgggcacatggatcgcatcctgcgcctggaagaaggccgactgatcgccgcgtag

SEQ ID NO: 149 - protein, 227 aa, Pseudomonas aeruginosa
MNDKSVLSCRNLSKSYDEGPQSVQVLSGVELNLLPGERVAIVGSSGSGKSTLLNMLGGLDTPSAGSVWLAGEELSALNETARGLLRNRALGFVYQFHHLLPEFTALENVCMPLLIGRTPIAEARQRAAELLERVGLGHRLSHKPAELSGGERQRVAIARALVNRPQLVLLDEPTGNLDQHTAQGIQELMLELSRSLQTSFLVVTHDLQLAGHMDRILRLEEGRLIAA

SEQ ID NO: 150 - DNA, 684 bp, Pseudomonas aeruginosa
atgaatgacaagtcggtgctgagttgccgcaacctgagcaagagctacgacgaggggccgcaatcggtgcaggtgctgtccggcgtcgagttgaacctgctgcctggggagcgggtggctatcgtcggcagctccggttcgggcaagagcaccttgctgaacatgctcggcggcctggacacgccctccgccggcagcgtctggctcgccggcgaggaactctcggcgctgaacgagacggcccgcgggctgctgcgcaaccgcgcgctgggcttcgtctaccagttccaccacctgttgccggagttcaccgccctggagaacgtctgcatgccgctgttgatcggccgcacgccgatcgcggaagcccgccagcgggcggccgagctgctggagcgggtcgggctggatcatcgcctgtcgcacaagccggccgagctgtccggcggcgagcgccagcgggtggcgatcgcccgcgcgctggtcaaccgtccgcagctggtactgctcgacgagcccaccggcaaccttgaccagcataccgcccagggtatccaggagctgatgctggaactgagccgttcgttgcagacctcgttcctggtggtaacccacgatctccagctggccgggcacatggatcgcatcctgcgcctggaagaaggccgactgatcgccgcgtag

SEQ ID NO: 151 - protein, 227 aa, Pseudomonas aeruginosa
MNDKSVLSCRNLSKSYDEGPQSVQVLSGVELNLLPGERVAIVGSSGSGKSTLLNMLGGLDTPSAGSVWLAGEELSALNETARGLLRNRALGFVYQFHHLLPEFTALENVCMPLLIGRTPIAEARQRAAELLERVGLDHRLSHKPAELSGGERQRVAIARALVNRPQLVLLDEPTGNLDQHTAQGIQELMLELSRSLQTSFLVVTHDLQLAGHMDRILRLEEGRLIAA

SEQ ID NO: 152 - DNA, 33 bp, Pseudomonas aeruginosa
gcggcggcccatatgaatgacaagtcggtgctg

SEQ ID NO: 153 - DNA, 27 bp, Pseudomonas aeruginosa
gcgcggatcccgcggcgatcagtcggc

SEQ ID NO: 154 - protein, 13 aa, Pseudomonas aeruginosa
LENVCMPLLIGRT

SEQ ID NO: 155 - protein, 15 aa, Pseudomonas aeruginosa
PQSVQVLSGVELNLL

SEQ ID NO: 156 - protein, 25 aa, Pseudomonas aeruginosa
ELMLELSRSLQTSFLVVTHDLQLAG

SEQ ID NO: 157 - DNA, 1488 bp, Streptococcus pneumoniae
atgtcatctaaggttattgttacaattttcggtgcgagtggagacctggctaaacgcaagctctacccttccctttttagactatatcaatccggcaatctttccaagcactttgccgttattggaactgcccgtagaccttggagtaaggaatattttgaatctgtagttgtcgagtccatccttgatttggcagatagtaccgagcaagcccaagaatttgctagccacttctactatcaaagccatgatgtcaatgattcggaacattatattgctttgcgtcaattacaagctgagcttaatgaaaaataccaagctgaacacaataagctcttcttcttgtctatggcacctcagttctttggaaccattgccaaacacctcaaatctgaaaacattgtcgatggcaaaggttttgagcgcttgatcgttgaaaaaccatttggtacagattacgcaactgcaagcaagttgaatgacgaactcctagcaacatttgacgaagaacaaattttccgtatcgaccattatcttggtaaggaaatgatccaaagcatctttgcagttcgctttgcaaacttgatttttgaaaacgtttggaacaaggattttatcgacaatgttcaaattacctttgcggagcgcttgggtgtagaagaacgtggtggctactatgaccaatccggtgccctccgtgacatggtccaaaaccacactctacaacttctttcgctcctcgccatggacaaaccagcaagcttcacaaaagacgagattcgtgctgaaaagattaaggtctttaaaaacctctatcatccaactgatgaagaactcaaagaacactttatccgtgggcaataccgctctggtaagattgatggcatgaaatacatctcttatcgtagcgagccaaatgtgaatccagaatcaacaactgaaacctttacatctggtgccttctttgtagacagcgatcgattccgtggtgttcctttctttttccgtacaggtaaacgactgactgaaaaaggaactcatgtcaacatcgtctttaaacaaatggattctatctttggagaaccacttgctccaaatattttgaccatctatattcaaccaacagaaggcttctctcttagcctaaatgggaagcaagtaggagaagaatttaacttggctcctaactcacttgattaccgtacagatgcgactgcaactggtgcttctccagaaccatacgaaaaattgatttatgatgtcctaaataacaactcaactaactttagccactgggatgaagtttgtgcgtcatggaagttgattgaccgtattgaaaagctctgggctgaaaatggtgccccacttcatgactataaagctggaagcatgggacctcaagccagctttgacctacttgaaaaattcggtgccaaatggacttggcaaccagatatcacctatcgtcaagatggtcgcttagaataa

SEQ ID NO: 158 - protein, 495 aa, Streptococcus pneumoniae
MSSKVIVTIFGASGDLAKRKLYPSLFRLYQSGNLSKHFAVIGTARRPWSKEYFESVVVESILDLADSTEQAQEFASHFYYQSHDVNDSEHYIALRQLQAELNEKYQAEHNKLFFLSMAPQFFGTIAKHLKSENIVDGKGFERLIVEKPFGTDYATASKLNDELLATFDEEQIFRIDHYLGKEMIQSIFAVRFANLIFENVWNKDFIDNVQITFAERLGVEERGGYYDQSGALRDMVQNHTLQLLSLLAMDKPASFTKDEIRAEKIKVFKNLYHPTDEELKEHFIRGQYRSGKIDGMKYISYRSEPNVNPESTTETFTSGAFFVDSDRFRGVPFFFRTGKRLTEKGTHVNIVFKQMDSIFGEPLAPNILTIYIQPTEGFSLSLNGKQVGEEFNLAPNSLDYRTDATATGASPEPYEKLIYDVLNNNSTNFSHWDEVCASWKLIDRIEKLWAENGAPLHDYKAGSMGPQASFDLLEKFGAKWTWQPDITYRQDGRLE

SEQ ID NO: 159 - DNA, 1488 bp, Streptococcus pneumoniae
atgtcatctaaggttattgttacaattttcggtgcgagtggagacctggctaaacgcaagctctacccttccctttttagactatatcaatccggcaatctttccaagcactttgccgttattggaactgcccgtagaccttggagtaaggaatattttgaatctgtagttgtcgagtccatccttgatttggcagatagtaccgagcaagcccaagaatttgctagccacttctactatcaaagccatgatgtcaatgattcggaacattatattgctttgcgtcaattacaagctgagcttaatgaaaaataccaagctgaacacaataagctcttcttcttgtctatggcacctcagttctttggaaccattgccaaacacctcaaatctgaaaacattgtcgatggcaaaggttttgagcgcttgatcgttgaaaaaccatttggtacagattacgcaactgccagcaagttgaatgacgaactcctagcaacatttgacgaagaacaaattttccgtatcgaccattatcttggtgaggaaatgatccaaagcatctttgccgttcgctttgcaaacttgatttttgaaaacgtttggaacaacggatttatcgacaatgttcaaattacctttgcggagcgcttgggtgtagaagaacgtggtggctactatgaccaatccggtgccctccgtgacatggtccaaaaccacactctacaacttctttcgctcctcgccatggacaaaccagcaagcttcacaaaagacgagattcgtgctgaaaagattaaggtctttaaaaacctctatcatccaactgatgaagaactcaaagaacactttatccgtgggcaataccgctctggtaagattgatggcatgaaatacatctcttatcgtggcgagccaaatgtgaatccagaatcaacaactgaaacctttacatctggtgccttctttgtagacagcgatcgattccgtggtgttcctttctttttccgtacaggtaaacgactgactgaaaaaggaactcatgtcaacatcgtctttaaacaaatggattctatctttggagaaccacttgctccaaatattttgaccatctatattcaaccaacagaaggcttctctcttagcctaaatgggaagcaagtaggagaagaatttaacttggctcctaactcacttgattaccgtacagatgcgactgcaactggtgcttctccagaaccatacgaaaaattgatttatgatgtcctaaataacaactcaactaactttagccactgggatgaagttggtgcgtcatggaagttgattgatcgtattgaaaagctctgggctgaaaatggtgccccacttcatgactataaagctggaagcatggggcctcaagccagctttgacctacttgaaaaattcggtgccaaatggacttggcaaccagatatcacctatcgtcaagatggtcgcttagaataa

SEQ ID NO: 160 - protein, 495 aa, Streptococcus pneumoniae
MSSKVIVTIFGASGDLAKRKLYPSLFRLYQSGNLSKHFAVIGTARRPWSKEYFESVVVESILDLADSTEQAQEFASHFYYQSHDVNDSEHYIALRQLQAELNEKYQAEHNKLFFLSMAPQFFGTIAKHLKSENIVDGKGFERLIVEKPFGTDYATASKLNDELLATFDEEQIFRIDHYLGEEMIQSIFAVRFANLIFENVWNNGFIDNVQITFAERLGVEERGGYYDQSGALRDMVQNHTLQLLSLLAMDKPASFTKDEIRAEKIKVFKNLYHPTDEELKEHFIRGQYRSGKIDGMKYISYRGEPNVNPESTTETFTSGAFFVDSDRFRGVPFFFRTGKRLTEKGTHVNIVFKQMDSIFGEPLAPNILTIYIQPTEGFSLSLNGKQVGEEFNLAPNSLDYRTDATATGASPEPYEKLIYDVLNNNSTNFSHWDEVGASWKLIDRIEKLWAENGAPLHDYKAGSMGPQASFDLLEKFGAKWTWQPDITYRQDGRLE

SEQ ID NO: 161 - DNA, 35 bp, Streptococcus pneumoniae
gcggcggcccatatgtcatctaaggttattgttac

SEQ ID NO: 162 - DNA, 30 bp, Streptococcus pneumoniae
gcgcggatccttctaagcgaccatcttgac

SEQ ID NO: 163 - protein, 13 aa, Streptococcus pneumoniae
FESVVVESILDLA

SEQ ID NO: 164 - protein, 13 aa, Streptococcus pneumoniae
NHTLQLLSLLAMD

SEQ ID NO: 165 - protein, 7 aa, Streptococcus pneumoniae
KVIVTIF

SEQ ID NO: 166 - DNA, 2619 bp, Streptococcus pneumoniae
atgaaacaactatctagtgcacaagtacgccaaatgtggcttgatttctgggcgaccaaaggtcactcagtagaaccatcagtaagtttggttcctgtaaatgacccaactcttttgtggatcaactctggggtagcaacccttaagaaatactttgacgggaccattatccctgaaaatccacgtattaccaatgcccaaaaggctatccgtaccaacgacatcgaaaacgtagggaagaccgcgcgtcaccataccatgtttgaaatgctggggaacttctctatcggggattacttccgtgacgaagctatcacttgggcttatgagcttttgacaagccctgaatggtttgatttccctgctgaaaaactttacatgacctactatccagacgataaagattcttacaaccgctggattgaagtgggagtggatccaagtcacttgattccaattgaggacaacttctgggaaatcggtgcgggaccttctggaccagatacagaaatcttctttgaccgtggggaagcctttgacccagaaaatatcggtcttcgcctgcttgcagaagatattgaaaacgaccgttatattgaaatctggaacatcgttttgtcacaatttaacgcagaccctgctgttcctcgtagcgaatacaaggaattgccacataagaacattgatacgggcgctggtttggagcgtttggtggccgttatccaaggggctaagaccaactttgaaacggacctcttcatgccgattatccgtgaagtcgagaaattgtctggtaaggtttatgaccaagatggcgacaacatgagcttcaaggttatcgcagaccacattcgttctctttcatttgctatcggtgatggtgcccttccaggaaatgaaggtcgtggttatgttcttcgtcgtcttctccgtcgtgcttctatgcatggtcaaaaattgggtatcaacgagcctttcctttacaaattggttccaactgttggaaaaatcatggaaagctactacccagaagtgcttgagaaacgtgactttattgagaaaatcgttaagagcgaagaagaatcatttgcccgtacccttcactcaggtcaacactttgcccaaggcattgtagcagacttgaaagaaaaaggtcaatctgttatcgctggttcagatgtcttcaaactctatgatacttatgggttcccagttgaattgactgaagaaatcgctgaagaagctggtatgactgtagaccgtgaaggttttgaagcagccatgaaagaacagcaagaacgcgcgcgtgcgtcagctgtcaagggtggctcaatgggtatgcaaaatgaaactcttcaaaacatcactgtagaaagtgtcttcaactacaatgctagccaattgtcttctaaattggtagctatcgttgctgacaatgcagaagtaggagctgtttcagaaggaactgcctctcttatctttgcggaaacgtcattttatgctgaaatgggtggacaggtagctgactacggacaaatcttggatgagtcaggtaaggttgtggctactgtgaccaatgttcagaaagccccaaatggtcaagcccttcatacagttgaagtccttgcaccgcttgccttgaaccaagaatataccttggcaattgatagcaatcgccgtcaccgtgtcatgaaaaaccacactgcgactcatttgcttcacgctgcccttcacaatatccttggaaaccacgcaacacaggcaggatctcttaacgaagttgaattccttcgctttgactttacccacttccaagcagtaactgctgaggaacttcgtgcgattgaacagcaagttaacgagaaaatttgggaagcacttgaagtgaagacagttgaaacggatattgacactgctaaagaaatgggagctatggccctctttggtgagaaatacggcaaggaagttcgtgtcgtgactatcggtgactactctattgaactttgtggtggtactcatgttgacaacacttctgagattggtctcttcaaaattgtcaaagaagaaggaatcggttcaggaactcgccgtatcttggcagtgactggtaaggaagcctttgaagcctatcgtgaacaagaggatgctcttaaagctatcgcagcaaccttgaaagcacctcaagtcaaggaagtacctcacaaggtagaaggacttcaagaacaacttcgtcaacttcaaaaagaaaatgctgagttgaaagaaaaagccgcagctgcagccgcaggcgatatcttcaaagatgttaaggaagtcaacggtcatcgttacattgctagtcaagtgtctgtatccgatgccggtgcccttcgtacttttgcagataactggaaacaaaaagactactctgatcttcttgtcctagttgccgctatcggtgacaaagtcaatgtccttgtagcaagcaagacaaaagaccttcatgcaggaaaccttgtcaaagaattagcaccaatcatcgatggacgtggtggtggtaaaccagatatggccatggcaggaggaagcaaccaacctaagatccaagaattgttggatgcagtagcaggtaaattgtaa

SEQ ID NO: 167 - protein, 872 aa, Streptococcus pneumoniae
MKQLSSAQVRQMWLDFWATKGHSVEPSVSLVPVNDPTLLWINSGVATLKKYFDGTIIPENPRITNAQKAIRTNDIENVGKTARHHTMFEMLGNFSIGDYFRDEAITWAYELLTSPEWFDFPAEKLYMTYYPDDKDSYNRWIEVGVDPSHLIPIEDNFWEIGAGPSGPDTEIFFDRGEAFDPENIGLRLLAEDIENDRYIEIWNIVLSQFNADPAVPRSEYKELPHKNIDTGAGLERLVAVIQGAKTNFETDLFMPIIREVEKLSGKVYDQDGDNMSFKVIADHIRSLSFAIGDGALPGNEGRGYVLRRLLRRASMHGQKLGINEPFLYKLVPTVGKIMESYYPEVLEKRDFIEKIVKSEEESFARTLHSGQHFAQGIVADLKEKGQSVIAGSDVFKLYDTYGFPVELTEEIAEEAGMTVDREGFEAAMKEQQERARASAVKGGSMGMQNETLQNITVESVFNYNASQLSSKLVAIVADNAEVGAVSEGTASLIFAETSFYAEMGGQVADYGQILDESGKVVATVTNVQKAPNGQALHTVEVLAPLALNQEYTLAIDSNRRHRVMKNHTATHLLHAALHNILGNHATQAGSLNEVEFLRFDFTHFQAVTAEELRAIEQQVNEKIWEALEVKTVETDIDTAKEMGAMALFGEKYGKEVRVVTIGDYSIELCGGTHVDNTSEIGLFKIVKEEGIGSGTRRILAVTGKEAFEAYREQEDALKAIAATLKAPQVKEVPHKVEGLQEQLRQLQKENAELKEKAAAAAAGDIFKDVKEVNGHRYIASQVSVSDAGALRTFADNWKQKDYSDLLVLVAAIGDKVNVLVASKTKDLHAGNLVKELAPIIDGRGGGKPDMAMAGGSNQPKIQELLDAVAGKL

SEQ ID NO: 168 - DNA, 2619 bp, Streptococcus pneumoniae
atgaaacaactatctagtgcacaagtacgccaaatgtggcttgatttctgggcgaccaaaggtcactcagtagaaccatcagtaagtttggttcctgtaaatgacccaactcttttgtggatcaactctggggtagcaacccttaagaaatactttgacgggaccattatccctgaaaatccacgtattaccaatgcccaaaaggctatccgtaccaacgacatcgaaaacgtagggaagactgcgcgtcaccataccatgtttgaaatgttggggaacttctctatcggggattacttccgtgacgaagctatcacttgggcttatgagcttttgacaagccctgaatggtttgatttccctgctgaaaaactttacatgacctactatccagacgataaagattcttacaaccgctggattgaagtgggagtggatccaagtcacttgattccaattgaggacaacttctgggaaatcggtgcgggaccttctggaccagatacagaaatcttctttgaccgtggggaagcttttgacccagaaaatatcggtcttcgcctgcttgcagaagatattgaaaacgaccgttatattgaaatctggaacatcgttttgtcacaatttaacgcagaccctgctgttcctcgtagcgaatacaaggaattgccacataagaacattgatacgggcgctggtttggagcgtttggtggccgttatccaaggggctaagaccaactttgaaacggacctcttcatgccgattatccgtgaagtcgagaaattgtctggtaaggtttatgaccaagatggcgacaacatgagcttcaaggttatcgcagaccacattcgttctctttcatttgctatcggtgatggtgcccttccaggaaatgaaggtcgtggttatgttcttcgtcgtcttctccgtcgtgcttctatgcatggtcaaaaattgggtatcaacgagcctttcctttacaaattggttccaactgttggaaaaatcatggaaagctactacccagaagtgcttgagaaacgtgactttattgagaaaatcgttaagagcgaagaagaatcatttgcccgtacccttcactcaggtcaacactttgcccaaggcattgtagcagacttgaaagaaaaaggtcaatctgttatcgctggttcagatgtcttcaaactctatgatacttatgggttcccagttgaattgactgaagaaatcgctgaagaagctggtatgactgtagaccgtgaaggttttgaagcagccatgaaagaacagcaagaacgcgcgcgtgcgtcagctgtcaagggtggctcaatgggtatgcaaaatgaaactcttcaaaacatcactgtagaaagtgtcttcaactacaatgctagccaattgtcttctaaattggtagctatcgttgctgacaatgcagaagtaggagctgtttcagaaggaactgcctctcttatctttgcggaaacgtcattttatgctgaaatgggtggacaggtagctgactacggacaaatcttggatgagtcaggtaaggttgtggctactgtgaccaatgttcagaaagccccaaatggtcaagcccttcatacagttgaagtccttgcaccgcttgccttgaaccaagaatataccttggcaattgatagcaatcgccgtcaccgtgtcatgaaaaaccacactgcgactcatttgcttcacgctgcccttcacaatatccttggaaaccacgcaacacaggcaggatctcttaacgaagttgaattccttcgctttgactttacccacttccaagcagtaactgctgaggaacttcgtgcgattgaacagcaagttaacgagaaaatttgggaagcacttgaagtgaagacagttgaaacggatattgacactgctaaagaaatgggagctatggccctctttggtgagaaatacggcaaggaagttcgtgtcgtgactatcggtgactactctattgaactttgtggtggtacccacgttggcaacacttctgagattggtctcttcaaaattgtcaaagaagaaggaatcggttcaggaactcgtcgtatcttggcagtgactggtaaggaagcctttgaagcctatcgtgaacaagaggacgctcttaaagctgttgcagcaaccttgaaagcacctcaagtcaaggaagtacctcacaaggtagaaggacttcaagaacaacttcgtcaacttcaaaaagaaaatgctgagttgaaagaaaaagccgcagctgcagccgcaggcgatatcttcaaggatgtgaaggaagtcaacggtcaccgctacattgctagtcaagtgtctgtatcagatgccggtgcccttcgtacctttgcagataactggaaacaaaaagactactctgatcttcttgtcctagttgctgctatcggtgacaaagtcaatgtccttgtagcaagcaagacaaaagaccttcatgcaggaaaccttgtcaaagaattagcaccaatcatcgatggacgtggtggtggtaaaccagacatggccatggcaggaggaagcaaccaacctaagatccaagaattgttggatgcagtagcaggtaaattgtaa

SEQ ID NO: 169 - protein, 872 aa, Streptococcus pneumoniae
MKQLSSAQVRQMWLDFWATKGHSVEPSVSLVPVNDPTLLWINSGVATLKKYFDGTIIPENPRITNAQKAIRTNDIENVGKTARHHTMFEMLGNFSIGDYFRDEAITWAYELLTSPEWFDFPAEKLYMTYYPDDKDSYNRWIEVGVDPSHLIPIEDNFWEIGAGPSGPDTEIFFDRGEAFDPENIGLRLLAEDIENDRYIEIWNIVLSQFNADPAVPRSEYKELPHKNIDTGAGLERLVAVIQGAKTNFETDLFMPIIREVEKLSGKVYDQDGDNMSFKVIADHIRSLSFAIGDGALPGNEGRGYVLRRLLRRASMHGQKLGINEPFLYKLVPTVGKIMESYYPEVLEKRDFIEKIVKSEEESFARTLHSGQHFAQGIVADLKEKGQSVIAGSDVFKLYDTYGFPVELTEEIAEEAGMTVDREGFEAAMKEQQERARASAVKGGSMGMQNETLQNITVESVFNYNASQLSSKLVAIVADNAEVGAVSEGTASLIFAETSFYAEMGGQVADYGQILDESGKVVATVTNVQKAPNGQALHTVEVLAPLALNQEYTLAIDSNRRHRVMKNHTATHLLHAALHNILGNHATQAGSLNEVEFLRFDFTHFQAVTAEELRAIEQQVNEKIWEALEVKTVETDIDTAKEMGAMALFGEKYGKEVRVVTIGDYSIELCGGTHVGNTSEIGLFKIVKEEGIGSGTRRILAVTGKEAFEAYREQEDALKAVAATLKAPQVKEVPHKVEGLQEQLRQLQKENAELKEKAAAAAAGDIFKDVKEVNGHRYIASQVSVSDAGALRTFADNWKQKDYSDLLVLVAAIGDKVNVLVASKTKDLHAGNLVKELAPIIDGRGGGKPDMAMAGGSNQPKIQELLDAVAGKL

SEQ ID NO: 170 - DNA, 34 bp, Streptococcus pneumoniae
gcggcggcccatatgaaacaactatctagtgcac

SEQ ID NO: 171 - DNA, 31 bp, Streptococcus pneumoniae
gcgcagatctcaatttacctgctactgcatc

SEQ ID NO: 172 - protein, 22 aa, Streptococcus pneumoniae
YSDLLVLVAAIGDKVNVLVASK

SEQ ID NO: 173 - protein, 31 aa, Streptococcus pneumoniae
GHSVEPSVSLVPVNDPTLLWINSGVATLKKY

SEQ ID NO: 174 - protein, 20 aa, Streptococcus pneumoniae
LHTVEVLAPLALNQEYTLAI

SEQ ID NO: 175 - DNA, 1461 bp, Streptococcus pneumoniae
atgtcaaaagatatccgcgtacgttacgcaccaagtccaacaggactactacacatcggaaatgctcgtacagcattgtttaattacttgtatgcgcgccatcatggtggaacatttctcatccgtatcgaagatactgaccgtaaacgccatgtcgaggatggtgaacgttcacaacttgaaaaccttcgctggttaggcatggattgggatgaaagtccagaatcacatgagaattatcgccagtctgagcgtttggacttgtatcaaaaatatattgaccaactattagctgaaggaaaagcctataaatcttacgttacagaagaagagttggcagctgaacgcgaacgccaagaagtagctggcgaaacaccacgctacatcaatgaataccttggtatgagtgaagaagaaaaagcagcttacatcgcagaacgtgaagcagcagggatcatcccaactgttcgtttggctgtcaatgagtcaggtatctacaagtggcatgatatggtcaaaggcgatatcgaatttgaaggtggcaatatcggtggtgactgggttatccaaaagaaagacggttacccaacttacaactttgccgttgttatcgatgaccacgatatgcaaatctctcatgttatccgtggagatgaccatattgctaatacaccaaaacagcttatggtctatgaagctcttggttgggaagctccagagttcggtcacatgaccttgattatcaactctgaaactggtaagaagttatctaaacgtgatactaatacacttcaatttatcgaagattaccgaaagaaaggttaccttccagaagcagtctttaactttattgctcttcttggttggaacccaggtggtgaagatgagattttctctcgtgaagaattcattaaactttttgatgaaaaccgcctcagcaagtcaccagcagcctttgatcagaaaaaactagactggatgagcaatgattatatcaagaatgcagaccttgaaaccatctttgaaatggcaaaaccattcttagaggaagcaggccgtttgactgacaaggctgaaaaattagttgagctctataaaccacaaatgaaatcagtagatgagattatcccattgacagatcttttcttctcagatttcccagaattgacagaagcagagcgcgaagtcatgacgggtgaaacagttccaacagttcttgaagcattcaaagcaaaacttgaagcgatgacagatgatgaatttgtgacagaaaatatcttcccacaaattaaagcagtccaaaaagaaacaggtattaaagggaaaaatcttttcatgcctattcgtatcgcagtttcaggcgaaatgcatgggccagaattaccagatacaattttcttgcttggacgtgaaaaatcaattcagcatatcgaaaacatgctaaaagaaatctctaaataa

SEQ ID NO: 176 - protein, 486 aa, Streptococcus pneumoniae
MSKDIRVRYAPSPTGLLHIGNARTALFNYLYARHHGGTFLIRIEDTDRKRHVEDGERSQLENLRWLGMDWDESPESHENYRQSERLDLYQKYIDQLLAEGKAYKSYVTEEELAAERERQEVAGETPRYINEYLGMSEEEKAAYIAEREAAGIIPTVRLAVNESGIYKWHDMVKGDIEFEGGNIGGDWVIQKKDGYPTYNFAVVIDDHDMQISHVIRGDDHIANTPKQLMVYEALGWEAPEFGHMTLIINSETGKKLSKRDTNTLQFIEDYRKKGYLPEAVFNFIALLGWNPGGEDEIFSREEFIKLFDENRLSKSPAAFDQKKLDWMSNDYIKNADLETIFEMAKPFLEEAGRLTDKAEKLVELYKPQMKSVDEIIPLTDLFFSDFPELTEAEREVMTGETVPTVLEAFKAKLEAMTDDEFVTENIFPQIKAVQKETGIKGKNLFMPIRIAVSGEMHGPELPDTIFLLGREKSIQHIENMLKEISK

SEQ ID NO: 177 - DNA, 1461 bp, Streptococcus pneumoniae
atgtcaaaagatatccgcgtacgttacgcaccaagtccaacaggactactacacatcggaaatgctcgtacagcattgtttaattacttgtatgcgcgccatcatggtggaacatttctcatccgtatcgaagatactgaccgtaaacgccatgttgaggatggtgaacgttcacaacttgaaaaccttcgctggttaggcatggattgggatgaaagtccagaatcacatgagaattatcgccagtctgagcgtttggacttgtatctaaaatacattgaccaactattagctgaaggaaaagcctataaatcttacgttacagaagaagagttagcagctgaacgcgaacgccaagaagtagctggtgaaacaccacgctacatcaatgaataccttggtatgagtgaagaagaaaaagcagcttacatcgcagaacgtgaagcagcagggatcatcccaactgttcgtttggctgtcaatgagtcaggtatctacaagtggcatgatatggtcaaaggcgatatcgaatttgaaggtggcaatatcggtggtgactgggttatccaaaagaaagacggttacccaacttacaactttgccgttgttatcgatgaccacgatatgcaaatctctcatgttatccgtggagatgaccatattgctaatacaccaaaacagcttatggtctatgaagctcttggttgggaagctccagagttcggtcacatgaccttgattatcaactctgaaactggtaagaagttatctaaacgtgatactaatacacttcaatttatcgaagattaccgaaagaaaggttaccttccagaagcagtctttaactttattgctcttcttggttggaacccaggtggtgaagatgagattttctctcgtgaagaattcattaaactttttgatgaaaaccgcctcagcaagtcaccagcagcctttgatcagaaaaaactagactggatgagcaatgattatatcaagaatgcagaccttgaaaccatctttgaaatggcaaaaccattcttagaggaagcaggccgtttgactgacaaggctgaaaaattagttgagctctataaaccacaaatgaaatcagtagatgagattatcccattgacagatcttttcttctcagattttccagaattgacagaagcagagcgcgaagtcatgacgggtgaaacagttccaacagttcttgaagcattcaaagcaaaacttgaagcgatgacagatgataaatttgtgacagaaaatatcttcccacaaattaaagcagttcaaaaagaaacaggtattaaagggaaaaatcttttcatgcctattcgtatcgcagtttcaggcgaaatgcatgggccagaattaccagatacaattttcttgcttggacgtgaaaaatcaattcagcatatcgaaaacatgctaaaagaaatctctaaataa

SEQ ID NO: 178 - protein, 486 aa, Streptococcus pneumoniae
MSKDIRVRYAPSPTGLLHIGNARTALFNYLYARHHGGTFLIRIEDTDRKRHVEDGERSQLENLRWLGMDWDESPESHENYRQSERLDLYLKYIDQLLAEGKAYKSYVTEEELAAERERQEVAGETPRYINEYLGMSEEEKAAYIAEREAAGIIPTVRLAVNESGIYKWHDMVKGDIEFEGGNIGGDWVIQKKDGYPTYNFAVVIDDHDMQISHVIRGDDHIANTPKQLMVYEALGWEAPEFGHMTLIINSETGKKLSKRDTNTLQFIEDYRKKGYLPEAVFNFIALLGWNPGGEDEIFSREEFIKLFDENRLSKSPAAFDQKKLDWMSNDYIKNADLETIFEMAKPFLEEAGRLTDKAEKLVELYKPQMKSVDEIIPLTDLFFSDFPELTEAEREVMTGETVPTVLEAFKAKLEAMTDDKFVTENIFPQIKAVQKETGIKGKNLFMPIRIAVSGEMHGPELPDTIFLLGREKSIQHIENMLKEISK

SEQ ID NO: 179 - DNA, 34 bp, Streptococcus pneumoniae
gcggcggcccatatgtcaaaagatatccgcgtac

SEQ ID NO: 180 - DNA, 37 bp, Streptococcus pneumoniae
gcgcggatcctttagagatttcttttagcatgttttc

SEQ ID NO: 181 - protein, 10 aa, Streptococcus pneumoniae
TYNFAVVIDD

SEQ ID NO: 182 - protein, 14 aa, Streptococcus pneumoniae
AGIIPTVRLAVNES

SEQ ID NO: 183 - protein, 11 aa, Streptococcus pneumoniae
VPTVLEAFKAK

SEQ ID NO: 184 - DNA, 2793 bp, Streptococcus pneumoniae
atgaaactcaaagacacccttaatcttgggaaaactgaattcccaatgcgtgcaggccttcctaccaaagagccagtttggcaaaaggaatgggaagatgcaaaactttatcaacgtcgtcaagaattgaaccaaggaaaacctcatttcaccttgcatgatggccctccatacgctaacggaaatatccacgttggacatgctatgaacaagatttcaaaagatatcattgttcgttctaagtctatgtcaggattttacgcaccatttattcctggttgggatactcatggtctgccaatcgagcaagtcttgtcaaaacaaggtgtcaaacgtaaagaaatggacttggttgagtacttgaaactttgccgtgagtacgctctttctcaagtagataaacaacgtgaagattttaaacgtttgggtgtttctggtgactgggaaaatccatatgtgaccttgactcctgactatgaagcagctcaaattcgtgtatttggtgagatggctaataagggttatatctaccgtggtgctaagccagtttactggtcatggtcatctgagtcagcacttgctgaagcagagattgaataccatgacttggtttcaacttccctttactatgccaacaaggtaaaagatggcaaaggagttctagatacagatacttatatcgttgtctggacaacgactccatttaccatcacagcttctcgtggtttgacggttggtgcagatattgattacgttttggttcaacctgctggtgaagctcgtaagtttgtcgttgctgctgaattattgactagcttgtctgagaaatttggctgggctgatgttcaagttttggaaacttaccgtggccaagaactcaaccacatcgtaacagaacacccatgggatacagctgtagaagagttggtaattcttggtgaccacgttacgactgactctggtacaggtattgtccatacagcccctggttttggtgaggacgattacaatgttggtattgctaataatcttgaagtcgcagtgactgttgatgaacgtggtatcatgatgaagaatgctggtcctgaatttgaaggtcaattctatgaaaaggtagttccaactgttattgaaaaacttggtaacctccttcttgcccaagaagaaatctctcactcatatccatttgactggcgtactaagaaaccaatcatctggcgtgcagttccacaatggtttgcctcagtttctaaattccgtcaagaaatcttggacgaaattgaaaaagtgaaattccactcagaatggggtaaagtccgtctttacaatatgatccgtgaccgtggtgactgggttatctctcgtcaacgtgcttggggtgttccacttcctatcttctacgctgaagatggtacagctatcatggtagctgaaactattgaacacgtagctcaactttttgaagaatatggttcaagcatttggtgggaacgtgatgccaaagacctcttgccagaaggatttactcatccaggttcaccaaacggcgagttcaaaaaagaaactgatatcatggacgtttggtttgactcaggttcatcatggaatggagtggtggtaaaccgtcctgaattgacttacccagccgacctttacctagaaggttctgaccaataccgtggttggtttaactcatcacttatcacatctgttgccaaccatggcgtagcaccttacaaacaaatcttgtcacaaggttttgcccttgatggtaaaggtgagaagatgtctaaatctcttggaaatactattgctccaagcgatgttgaaaaacaattcggtgctgaaatcttgcgtctctgggtaacaagtgttgactcaagcaatgacgtgcgtatctctatggatatcttgagccaagtttctgaaacttaccgtaagattcgtaacactcttcgtttcttgattgccaatacatctgactttaacccagctcaagatacagtcgcttacgatgagcttcgttcagttgataagtacatgacgattcgctttaaccagcttgtcaagaccattcgtgatgcctatgcagactttgaattcttgacgatctacaaggccttggtgaactttatcaacgttgacttgtcagccttctaccttgattttgccaaagatgttgtttacattgaaggtgccaaatcactggaacgccgtcaaatgcagactgtcttctatgacattcttgtcaaaatcaccaaactcttgacaccaatccttcctcacactgcggaagaaatctggtcatatcttgagtttgaaacagaagacttcgtccaattgtcagaattaccagaagttcaaacttttgctaaccaagaagaaatcttggatacatgggcagccttcatggactttcgtggacaagcacaaaaagccttggaagaagctcgtaatgcaaaagttatcggtaaatcacttgaagcacacttgacagtttatccaaatgaagttgtgaaaactctactcgaagcagtaaacagcaatgtagcacaacttttgatcgtgtctgagttgaccatcgcagaaggaccagctccggaagctgcccttagcttcgaagatgtagccttcacagttgaacgtgctactggtgaagtatgtgaccgttgccgtcgtatcgacccaacaacagcagaacgcagctaccaggcagttatctgtgaccactgtgcaagcatcgtagaagaaaactttgcggaagcagtcgcagaaggatttgaagagaaataa

SEQ ID NO: 185 - protein, 930 aa, Streptococcus pneumoniae
MKLKDTLNLGKTEFPMRAGLPTKEPVWQKEWEDAKLYQRRQELNQGKPHFTLHDGPPYANGNIHVGHAMNKISKDIIVRSKSMSGFYAPFIPGWDTHGLPIEQVLSKQGVKRKEMDLVEYLKLCREYALSQVDKQREDFKRLGVSGDWENPYVTLTPDYEAAQIRVFGEMANKGYIYRGAKPVYWSWSSESALAEAEIEYHDLVSTSLYYANKVKDGKGVLDTDTYIVVWTTTPFTITASRGLTVGADIDYVLVQPAGEARKFVVAAELLTSLSEKFGWADVQVLETYRGQELNHIVTEHPWDTAVEELVILGDHVTTDSGTGIVHTAPGFGEDDYNVGIANNLEVAVTVDERGIMMKNAGPEFEGQFYEKVVPTVIEKLGNLLLAQEEISHSYPFDWRTKKPIIWRAVPQWFASVSKFRQEILDEIEKVKFHSEWGKVRLYNMIRDRGDWVISRQRAWGVPLPIFYAEDGTAIMVAETIEHVAQLFEEYGSSIWWERDAKDLLPEGFTHPGSPNGEFKKETDIMDVWFDSGSSWNGVVVNRPELTYPADLYLEGSDQYRGWFNSSLITSVANHGVAPYKQILSQGFALDGKGEKMSKSLGNTIAPSDVEKQFGAEILRLWVTSVDSSNDVRISMDILSQVSETYRKIRNTLRFLIANTSDFNPAQDTVAYDELRSVDKYMTIRFNQLVKTIRDAYADFEFLTIYKALVNFINVDLSAFYLDFAKDVVYIEGAKSLERRQMQTVFYDILVKITKLLTPILPHTAEEIWSYLEFETEDFVQLSELPEVQTFANQEEILDTWAAFMDFRGQAQKALEEARNAKVIGKSLEAHLTVYPNEVVKTLLEAVNSNVAQLLIVSELTIAEGPAPEAALSFEDVAFTVERATGEVCDRCRRIDPTTAERSYQAVICDHCASIVEENFAEAVAEGFEEK

SEQ ID NO: 186 - DNA, 2793 bp, Streptococcus pneumoniae
atgaaactcaaagacacccttaatcttgggaaaactgaattcccaatgcgtgcaggccttcctaccaaagagccagtttggcaaaaggaatgggaagatgcaaaactttatcaacgtcgtcaagaattgaaccaaggaaaacctcatttcaccttgcatgatggccctccatacgctaacggaaatatccacgttggacatgctatgaacaagatttcaaaagatatcattgttcgttctaagtctatgtcaggattttacgcaccatttattcctggttgggatactcatggtctgccaatcgagcaagtattgtcaaaacaaggtgtcaaacgtaaagaaatggacttggttgagtacttgaaactttgccgtgagtacgctctttctcaagtagataaacaacgtgaagattttaaacgtttgggtgtttctggtgactgggaaaatccatatgtgaccttgactcctgactatgaagcagctcaaattcgtgtatttggtgagatggctaataagggttatatctaccgtggtgctaagccagtttactggtcatggtcatctgagtcagcacttgctgaagcagagattgaataccatgacttggtttcaacttccctttactatgccaacaaggtaaaagatggcaaaggagttctagatacagatacttatatcgttgtctggacaacgactccatttaccatcacagcttctcgtggtttgacggttggtgcagatattgattacgttttggttcaacctgctggtgaagctcgtaagtttgtcgttgctgctgaattattgactagcttgtctgagaaatttggctgggctgatgttcaagttttggaaacttaccgtggccaagaactcaaccacatcgtaacagaacacccatgggatacagctgtagaagagttggtaattcttggtgaccacgttacgactgactctggtacaggtattgtccatacagcccctggttttggtgaggacgattacaatgttggtattgctaataatcttgaagtcgcagtgactgttgatgaacgtggtatcatgatgaagaatgctggtcctgaatttgaaggtcaattctatgaaaaggtagttccaactgttattgaaaaacttggtaacctccttcttgcccaagaagaaatctctcactcatatccatttgactggcgtactaagaaaccaatcatctggcgtgcagttccacaatggtttgcctcagtttctaaattccgtcaagaaatcttggacgaaattgaaaaagtgaaattccactcagaatggggtaaagtccgtctttacaatatgatccgtgaccgtggtgactgggttatctctcgtcaacgtgcttggggtgttccacttcctatcttctacgctgaagatggtacagctatcatggtagctgaaactattgaacacgtagctcaactttttgaagaatatggttcaagcatttggtgggaacgtgatgccaaagacctcttgccagaaggatttactcatccaggttcaccaaacggcgagttcaaaaaagaaactgatatcatggacgtttggtttgactcaggttcatcatggaatggagtggtggtaaaccgtcctgaattgacttacccagccgacctttacctagaaggttctgaccaataccgtggttggtttaactcatcacttatcacatctgttgccaaccatggcgtagcaccttacaaacaaatcttgtcacaaggttttgcccttgatggtaaaggtgagaagatgtctaaatctcttggaaatactattgctccaagcgatgttgaaaaacaattcggtgctgaaatcttgcgtctctgggtaacaagtgttgactcaagcaatgacgtgcgtatctctatggatatcttgagccaagtttctgaaacttaccgtaagattcgtaacactcttcgtttcttgattgccaatacatctgactttaacccagctcaagatacagtcgcttacgatgagcttcgttcagttgataagtacatgacgattcgctttaaccagcttgtcaagaccattcgtgatgcctatgcagactttgaattcttgacgatctacaaggccttggtgaactttatcaacgttgacttgtcagccttctaccttgattttgccaaagatgttgtttacatggaaggtgccaaatcactggaacgccgtcaaatgcagactgtcttctatgacattcttgtcaaaatcaccaaactcttgacaccaatccttcctcacactgcggaagaaatctggtcatatcttgagtttgaaacagaagacttcgtccaattgtcagaattaccagaagttcaaacttttgctaaccaagaagaaatcttggatacatgggcagccttcatggactttcgtggacaagcacaaaaagccttggaagaagctcgtaatgcaaaagttatcggtaaatcacttgaagcacacttgacagtttatccaaatgaagttgtgaaaactctactcgaagcagtaaacagcaatgtagcacaacttttgatcgtgtctgagttgaccatcgcagaaggaccagctccagaagctgcccttagcttcgaagatgtagccttcacagttgaacgtgctgctggtgaagtatgtgaccgttgccgtcgtatcgacccaacaacagcagaacgcagctaccaggcagttatctgtgaccactgtgcaagcatcgtagaagaaaactttgcggaagcagtcgcagaaggatttgaagagaaataa

SEQ ID NO: 187 - protein, 930 aa, Streptococcus pneumoniae
MKLKDTLNLGKTEFPMRAGLPTKEPVWQKEWEDAKLYQRRQELNQGKPHFTLHDGPPYANGNIHVGHAMNKISKDIIVRSKSMSGFYAPFIPGWDTHGLPIEQVLSKQGVKRKEMDLVEYLKLCREYALSQVDKQREDFKRLGVSGDWENPYVTLTPDYEAAQIRVFGEMANKGYIYRGAKPVYWSWSSESALAEAEIEYHDLVSTSLYYANKVKDGKGVLDTDTYIVVWTTTPFTITASRGLTVGADIDYVLVQPAGEARKFVVAAELLTSLSEKFGWADVQVLETYRGQELNHIVTEHPWDTAVEELVILGDHVTTDSGTGIVHTAPGFGEDDYNVGIANNLEVAVTVDERGIMMKNAGPEFEGQFYEKVVPTVIEKLGNLLLAQEEISHSYPFDWRTKKPIIWRAVPQWFASVSKFRQEILDEIEKVKFHSEWGKVRLYNMIRDRGDWVISRQRAWGVPLPIFYAEDGTAIMVAETIEHVAQLFEEYGSSIWWERDAKDLLPEGFTHPGSPNGEFKKETDIMDVWFDSGSSWNGVVVNRPELTYPADLYLEGSDQYRGWFNSSLITSVANHGVAPYKQILSQGFALDGKGEKMSKSLGNTIAPSDVEKQFGAEILRLWVTSVDSSNDVRISMDILSQVSETYRKIRNTLRFLIANTSDFNPAQDTVAYDELRSVDKYMTIRFNQLVKTIRDAYADFEFLTIYKALVNFINVDLSAFYLDFAKDVVYMEGAKSLERRQMQTVFYDILVKITKLLTPILPHTAEEIWSYLEFETEDFVQLSELPEVQTFANQEEILDTWAAFMDFRGQAQKALEEARNAKVIGKSLEAHLTVYPNEVVKTLLEAVNSNVAQLLIVSELTIAEGPAPEAALSFEDVAFTVERAAGEVCDRCRRIDPTTAERSYQAVICDHCASIVEENFAEAVAEGFEEK

SEQ ID NO: 188 - DNA, 36 bp, Streptococcus pneumoniae
cgcggggtaccatgaaactcaaagacacccttaatc

SEQ ID NO: 189 - DNA, 31 bp, Streptococcus pneumoniae
gcgcggatcctttctcttcaaatccttctgc

SEQ ID NO: 190 - protein, 41 aa, Streptococcus pneumoniae
AKVIGKSLEAHLTVYPNEVVKTLLEAVNSNVAQLLIVSELT

SEQ ID NO: 191 - protein, 16 aa, Streptococcus pneumoniae
SYQAVICDHCASIVEE

SEQ ID NO: 192 - protein, 16 aa, Streptococcus pneumoniae
GLTVGADIDYVLVQPA

SEQ ID NO: 193 - DNA, 3678 bp, Streptococcus pneumoniae
gtggttgatgtaaatcgttttaaaagtatgcaaatcaccctagcttctccaagtaaagtccgttcatggtcttatggagaagtcaaaaaacctgaaacaatcaattatcgtaccttgaaaccagaacgtgaaggactctttgatgaagtgatctttggtcctacaaaagactgggaatgtgcttgtggtaagtacaaacgcattcgttacagaggaattgtttgtgaccgctgtggggttgaagtaacgcgtacgaaagttcgtcgtgagcgtatgggacatatcgaattgaaagctcctgtatctcacatctggtacttcaaggggattccaagccgtatgggcttgacccttgatatgagccctcgtgccctcgaggaagttatctactttgcggcttatgtggtgattgatcctaaggatacaccacttgagcacaagtctatcatgacagagcgcgaataccgagagcgcttgcgtgaatatggttatggttcatttgttgccaagatgggtgcggaagccatccaagaccttttgaagcaagtagatcttgaaaaagaaattgctgaactcaaagaagaattgaaaacagctactggacaaaagcgtgtcaaagccatccgtcgtttggatgttttggatgccttttacaagtctggaaacaaacctgaatggatgattcttaacatccttccggttatcccaccagatcttcgtccaatgttgcagttggatggtggccgttttgcctcatctgacttgaatgacctttaccgccgtgttatcaaccgtaacaaccgtttggctcgtttgcttgagttaaatgcaccaggtatcatcgttcaaaatgagaagcgtatgcttcaagaagcagttgacgctttgattgacaatggtcgtcgtggtcgtccaatcacaggaccaggtagccgtccattgaaatcattgagccacatgcttaaaggtaaacaaggacgcttccgtcaaaacttgctcggtaaacgtgttgacttctcaggacgttcagttatcgccgttggtccaactcttaagatgtaccaatgtggtgtgccgcgtgaaatggcgattgaactctttaaaccatttgtcatgcgtgaaatcgttgcccgtgatatcgtgcaaaacgtcaaagcagctaaacgcttggtggaacgcggagatgagcgtatctgggatatccttgaagaagtgattaaagaacacccagtgcttttgaaccgcgcaccgacccttcaccgtttgggtatccaagccttcgagccagtcttgattgatggtaaggctcttcgcttgcacccacttgtctgtgaagcctacaatgctgactttgacggggaccaaatggccatccacgtaccactttcagaagaagcacaagcagaagctcgtatcctcatgctagctgctgagcacatcttgaacccgaaagatgggaaaccggtagttactccatctcaggacatggttttgggtaactactacttgaccatggaagaagctggtcgcgaaggtgaaggaatggtcttcaaagaccgtgacgaagcggttatggcttaccgcaatggttatgttcacctccactcacgtgttggtatcgcaacagacagcctcaacaagccttggacagaagagcaaagacataaggtcttgcttacaacagttggtaaaattctcttcaacgatatcatgccagaggggctaccatacttgcaagaaccaaacaatgccaacttgacagaaggtgttccagctaaatacttcttgccacttggtggagatatcaaggaagctatcagcaatcttgagctcaaccctccattcaagaagaaaaaccttggaaatatcatcgctgaaatcttcaaacgtttccgtacgacagaaacttctgccctacttgaccgcatgaagaacctcggttaccaccactcaactcttgcaggattgacagtgggtattgccgatatcccagtcgttgatgacaaggctgaaatcattgaagaatcacacaaacgtgtcgaacaaatcaccaaacaattccgtcgtggtatgatcacagacgacgagcgttacaatgctgttacagctgaatggcgtgctgcccgtgaaaaacttgagaaacgcttgattgctaaccaagatcctaagaacccaatcgttatgatgatggactctggagcccgtggtaacatctcaaacttctcacagcttgccggtatgcgtggtctgatggctgctccgaatggacgtatcatggaattgccaatcctttcaaacttccgcgaaggtttgtcggtattggaaatgttcttctcaactcacggtgctcgtaaaggtatgaccgatacggcccttaagacagccgactcaggttacttgactcgtcgtttggtcgacgttgcccaagacgttatcatccgtgaggacgactgtggaactgaccgtggtctcttgatccgttctatcgcagaaggaaaagagatgatcgagtctctcgaagagcgtctcaacggtcgttacactaagaaaactgttaaacatccagaaactggtgcagtgattattggtccaaatgaattgattacagaagacaaggcgcgtgaaattgtcaatgctggtgtggaagaagtgactatccgttctgtatttacatgtaacactcgtcacggtgtctgccgtcactgttacggtatcaacttggcgactggtgatgcggttgaagttggtgaagcagttggtacaatcgctgcccaatctatcggggaacctggtacacagcttacaatgcgtaccttccacacaggtggggttgcctcaaataccgatatcactcagggtcttcctcgtgtccaagaaatctttgaagcccgcaatcctaaaggggaagcggttattacagaggttaaaggacaagttactgctatcgaagaagatgcatcaactcgtaccaagaaagtctttgttaagggtgaaactggcgaaggtgaatatgtcgttccatttacagctcgtatgcgtgtcgaagttgggggccaagtagcgcgtggtgctgctctgacagaaggttctatccaaccaaaacgtctccttgcagttcgtgatgtcttgtcagttgaaacgtaccttctcggtgaagtacaaaaagtttaccgtagccaaggggtagaaatcggtgacaaacacatcgaggtaatggttcgtcaaatgatccgtaaagtccgtgtcatggatccaggtgatacagatcttctcatgggtaccctcatggatatcaatgactttacagatgccaacaaagatgtccttatcgcaggtggagttccagcgacaggtcgcccagtccttatgggaattaccaaagcctcacttgaaacaaacagtttcttgtcagcggcttccttccaggaaacaactcgtgtccttactgacgcagctatccgtggtaagaaagaccatctccttggacttaaagaaaatgttatcatcggtaagatcatcccagctggtactggtatggcccgttaccgtaaccttgaaccacatgctgtcaacgaagaagaataccttaatcctccagtagaggaagaaggaaatgaagaaacaacagaagtagttgtggatactgccgttgaaactgtggaagaaacagtagaataa

SEQ ID NO: 194 - protein, 1225 aa, Streptococcus pneumoniae
VVDVNRFKSMQITLASPSKVRSWSYGEVKKPETINYRTLKPEREGLFDEVIFGPTKDWECACGKYKRIRYRGIVCDRCGVEVTRTKVRRERMGHIELKAPVSHIWYFKGIPSRMGLTLDMSPRALEEVIYFAAYVVIDPKDTPLEHKSIMTEREYRERLREYGYGSFVAKMGAEAIQDLLKQVDLEKEIAELKEELKTATGQKRVKAIRRLDVLDAFYKSGNKPEWMILNILPVIPPDLRPMLQLDGGRFASSDLNDLYRRVINRNNRLARLLELNAPGIIVQNEKRMLQEAVDALIDNGRRGRPITGPGSRPLKSLSHMLKGKQGRFRQNLLGKRVDFSGRSVIAVGPTLKMYQCGVPREMAIELFKPFVMREIVARDIVQNVKAAKRLVERGDERIWDILEEVIKEHPVLLNRAPTLHRLGIQAFEPVLIDGKALRLHPLVCEAYNADFDGDQMAIHVPLSEEAQAEARILMLAAEHILNPKDGKPVVTPSQDMVLGNYYLTMEEAGREGEGMVFKDRDEAVMAYRNGYVHLHSRVGIATDSLNKPWTEEQRHKVLLTTVGKILFNDIMPEGLPYLQEPNNANLTEGVPAKYFLPLGGDIKEAISNLELNPPFKKKNLGNIIAEIFKRFRTTETSALLDRMKNLGYHHSTLAGLTVGIADIPVVDDKAEIIEESHKRVEQITKQFRRGMITDDERYNAVTAEWRAAREKLEKRLIANQDPKNPIVMMMDSGARGNISNFSQLAGMRGLMAAPNGRIMELPILSNFREGLSVLEMFFSTHGARKGMTDTALKTADSGYLTRRLVDVAQDVIIREDDCGTDRGLLIRSIAEGKEMIESLEERLNGRYTKKTVKHPETGAVIIGPNELITEDKAREIVNAGVEEVTIRSVFTCNTRHGVCRHCYGINLATGDAVEVGEAVGTIAAQSIGEPGTQLTMRTFHTGGVASNTDITQGLPRVQEIFEARNPKGEAVITEVKGQVTAIEEDASTRTKKVFVKGETGEGEYVVPFTARMRVEVGGQVARGAALTEGSIQPKRLLAVRDVLSVETYLLGEVQKVYRSQGVEIGDKHIEVMVRQMIRKVRVMDPGDTDLLMGTLMDINDFTDANKDVLIAGGVPATGRPVLMGITKASLETNSFLSAASFQETTRVLTDAAIRGKKDHLLGLKENVIIGKIIPAGTGMARYRNLEPHAVNEEEYLNPPVEEEGNEETTEVVVDTAVETVEETVE

SEQ ID NO: 195 - DNA, 3678 bp, Streptococcus pneumoniae
gtggttgatgtaaatcgttttaaaagtatgcaaatcaccctagcttctccaagtaaagtccgttcatggtcttatggagaagtcaaaaaacctgaaacaatcaattaccgtaccttgaaaccagaacgtgaaggactctttgatgaagtgatctttggtcctacaaaagactgggaatgtgcttgtggtaagtacaaacgcattcgttacagaggaattgtttgtgaccgctgtggggttgaagtaacgcgtacgaaagttcgtcgtgagcgtatgggacatatcgagttgaaagctcctgtatctcacatctggtacttcaaggggattccaagccgtatgggcttgacccttgatatgagccctcgtgccctcgaggaagttatctactttgcggcttatgtggtgattgatcctaaggatacaccacttgagcacaagtctatcatgacagagcgcgaataccgagagcgcttgcgtgaatatggttatggttcatttgttgccaagatgggtgcggacgccatccaagaccttttgaagcaagtagatcttgaaaaagaaattgctgaactcaaagaagaattgaaaacagctactggacaaaagcgtgtcaaagccatccgtcgtttggatgttttggatgccttttacaagtctggaaacaaacctgaatggatgattcttaacatccttccggttatcccaccagatcttcgtccaatgttgcagttggatggtggccgttttgcctcatctgacttgaatgacctttaccgccgtgttatcaaccgtaacaaccgtttggctcgtttgcttgagttaaatgcaccaggtatcatcgttcaaaatgagaagcgtatgcttcaagaagcagttgacgctttgattgacaatggtcgtcgtggtcgtccaatcacaggaccaggtagccgtccattgaaatcattgagccacatgcttaaaggtaaacaaggacgcttccgtcaaaacttgctcggtaaacgtgttgacttctcaggacgttcagttatcgccgttggtccaactcttaagatgtaccaatgtggtgtgccgcgtgaaatggcgattgaactctttaaaccatttgtcatgcgtgaaatcgttgcccgtgatatcgtgcaaaacgtcaaagcagctaaacgcttggtggaacgcggagatgagcgtatctgggatatccttgaagaagtgattaaagaacacccagtgcttttgaaccgcgcaccgacccttcaccgtttgggtatccaagccttcgagccagtcttgattgatggtaaggctcttcgcttgcacccacttgtctgtgaagcctacaatgctgactttgacggggaccaaatggccatccacgtaccactttcagaagaagcacaagcagaagctcgtatcctcatgctagctgctgagcacatcttgaacccgaaagatgggaaaccggtagttactccatctcaggacatggttttgggtaactactacttgaccatggaagaagctggtcgcgaaggtgaaggaatggtcttcaaagaccgtgacgaagcggttatggcttaccgcaatggttatgttcacctccactcacgtgttggtatcgcaacagacagcctcaacaagccttggacagaagagcaaagacataaggtcttgcttacaacagttggtaaaattctcttcaacgatatcatgccagaggggctaccatacttgcaagaaccaaacaatgccaacttgacagaaggtgttccagctaaatacttcttgccacttggtggagatatcaaggaagctatcagcaatcttgagctcaaccctccattcaagaagaaaaaccttggaaatatcatcgctgaaatcttcaaacgtttccgtacgacagaaacttctgccctacttgaccgcatgaagaacctcggttaccaccactcaactcttgcaggattgacagtgggtattgccgatatcccagtcgttgatgacaaggctgaaatcattgaagaatcacacaaacgtgtcgaacaaatcaccaaacaattccgtcgtggtatgatcacagacgacgagcgttacaatgctgttacagctgaatggcgtgctgcccgtgaaaaacttgagaaacgcttgattgctaaccaagatcctaagaacccaatcgttatgatgatggactctggagcccgtggtaacatctcaaacttctcacagcttgccggtatgcgtggtctgatggctgctccgaatggacgtatcatggaattgccaatcctttcaaacttccgcgaaggtttgtcggtattggaaatgttcttctcaactcacggtgctcgtaaaggtatgaccgatacggcccttaagacagccgactcaggttacttgactcgtcgtttggtcgacgttgcccaagacgttatcatccgtgaggacgactgtggaactgaccgtggtctcttgatccgttctatcgcagaaggaaaagagatgatcgagtctctcgaagagcgtctcaacggtcgttacactaagaaaactgttaaacatccagaaactggtgcagtgattattggtccaaatgaattgattacagaagacaaggcgcgtgaaattgtcaatgctggtgtggaagaagtgactatccgttctgtatttacatgtaacactcgtcacggtgtctgccgtcactgttacggtatcaacttggcgactggtgatgcggttgaagttggtgaagcagttggtacaatcgctgcccaatctatcggggaacctggtacacagcttacaatgcgtaccttccacacaggtggggttgcctcaaataccgatatcactcagggtcttcctcgtgtccaagaaatctttgaagcccgcaatcctaaaggggaagcggttattacagaggttaaaggacaagttactgctatcgaagaagatgcatcaactcgtaccaagaaagtctttgttaagggtgaaactggcgaaggtgaatatgtcgttccatttacagctcgtatgcgtgtcgaagttggggcccaagtagcgcgtggtgctgctctgacagaaggttctatccaaccaaaacgtctccttgcagttcgtgatatcttgtcagttgaaacgtaccttctcggtgaagtacaaaaagtttaccgtagccaaggggtagaaatcggtgacaaacacatcgaggtaatggttcgtcaaatgatccgtaaagtccgtgtcatggatccaggtgatacagatcttctcatgggtaccctcatggatatcaatgactttacagatgccaacaaagatgtccttatcgcaggtggagttccagcgacaggtcgcccagtccttatgggaattaccaaagcctcacttgaaacaaacagtttcttgtcagcagcttccttccaagaaacaactcgtgtccttactgacgcagctatccgtggtaagaaagaccatctccttggacttaaagaaaatgttatcatcggtaagatcatcccagctggtactggtatggcccgttaccgtaaccttgaaccacatgctgtcaacgaagaagaataccttaatcctccagtagaggaagaaggaaatgaagaaacaacagaagtagttgtggatactgccgttgaaactgtggaagaaacagtagaataa

SEQ ID NO: 196 - protein, 1225 aa, Streptococcus pneumoniae
VVDVNRFKSMQITLASPSKVRSWSYGEVKKPETINYRTLKPEREGLFDEVIFGPTKDWECACGKYKRIRYRGIVCDRCGVEVTRTKVRRERMGHIELKAPVSHIWYFKGIPSRMGLTLDMSPRALEEVIYFAAYVVIDPKDTPLEHKSIMTEREYRERLREYGYGSFVAKMGADAIQDLLKQVDLEKEIAELKEELKTATGQKRVKAIRRLDVLDAFYKSGNKPEWMILNILPVIPPDLRPMLQLDGGRFASSDLNDLYRRVINRNNRLARLLELNAPGIIVQNEKRMLQEAVDALIDNGRRGRPITGPGSRPLKSLSHMLKGKQGRFRQNLLGKRVDFSGRSVIAVGPTLKMYQCGVPREMAIELFKPFVMREIVARDIVQNVKAAKRLVERGDERIWDILEEVIKEHPVLLNRAPTLHRLGIQAFEPVLIDGKALRLHPLVCEAYNADFDGDQMAIHVPLSEEAQAEARILMLAAEHILNPKDGKPVVTPSQDMVLGNYYLTMEEAGREGEGMVFKDRDEAVMAYRNGYVHLHSRVGIATDSLNKPWTEEQRHKVLLTTVGKILFNDIMPEGLPYLQEPNNANLTEGVPAKYFLPLGGDIKEAISNLELNPPFKKKNLGNIIAEIFKRFRTTETSALLDRMKNLGYHHSTLAGLTVGIADIPVVDDKAEIIEESHKRVEQITKQFRRGMITDDERYNAVTAEWRAAREKLEKRLIANQDPKNPIVMMMDSGARGNISNFSQLAGMRGLMAAPNGRIMELPILSNFREGLSVLEMFFSTHGARKGMTDTALKTADSGYLTRRLVDVAQDVIIREDDCGTDRGLLIRSIAEGKEMIESLEERLNGRYTKKTVKHPETGAVIIGPNELITEDKAREIVNAGVEEVTIRSVFTCNTRHGVCRHCYGINLATGDAVEVGEAVGTIAAQSIGEPGTQLTMRTFHTGGVASNTDITQGLPRVQEIFEARNPKGEAVITEVKGQVTAIEEDASTRTKKVFVKGETGEGEYVVPFTARMRVEVGAQVARGAALTEGSIQPKRLLAVRDILSVETYLLGEVQKVYRSQGVEIGDKHIEVMVRQMIRKVRVMDPGDTDLLMGTLMDINDFTDANKDVLIAGGVPATGRPVLMGITKASLETNSFLSAASFQETTRVLTDAAIRGKKDHLLGLKENVIIGKIIPAGTGMARYRNLEPHAVNEEEYLNPPVEEEGNEETTEVVVDTAVETVEETVE

SEQ ID NO: 197 - DNA, 38 bp, Streptococcus pneumoniae
gcggcggcccatatggttgatgtaaatcgttttaaaag

SEQ ID NO: 198 - DNA, 35 bp, Streptococcus pneumoniae
actagtctagattctactgtttcttccacagtttc

SEQ ID NO: 199 - protein, 14 aa, Streptococcus pneumoniae
TEVVVDTAVETVEE

SEQ ID NO: 200 - protein, 49 aa, Streptococcus pneumoniae
WDILEEVIKEHPVLLNRAPTLHRLGIQAFEPVLIDGKALRLHPLVCEAY

SEQ ID NO: 201 - protein, 15 aa, Streptococcus pneumoniae
LEEVIYFAAYVVIDP

SEQ ID NO: 202 - DNA, 1110 bp, Streptococcus pneumoniae
atggcaacaaaacaaaaagaagtaacaacatttgacgtacaggtagcagaatttatccgtaatcataagcaaaaagggacagcaacagatgatgaaatcaatgcaagtctggttattccttttaccttggacgctgatgggattgaagatctcttgcaacggattcaggatgcaggcatttctatcacagataacgaaggaaatccaagtgcgcgtgttctcagcaatgaagaagaaccagaactcagcgatgaggacttgattgggtcaacttctgctaaggtcaatgaccctgtccgtatgtacttgaaagaaataggggtcgttcctctcttgaccaatgaagaggagaaagagttggcactggctgttgaagctggtgatatcgaagccaaacaacgtcttgcggaagccaatcttcgtttggttgtttccattgccaaacgctatgtcggtcgtggtatgcagttccttgacttgattcaagaaggaaatatgggcttgatgaaggcggttgacaagtttgactattctaaagggttcaagttttcaacttatgcaacttggtggattcgtcaggctatcactcgtgctattgcggaccaagctcgtaccatccgtatcccagttcacatggttgaaactatcaataaattggttcgtgaacagcggaatctccttcaagaattggggcaagatccgacaccagaacagattgctgaacgaatggatatgacacctgataaggttcgtgaaatcttgaagattgcccaagaaccagtatctcttgaaactcctatcggtgaagaggacgatagccaccttggagactttatcgaagatgaagtgattgaaaatccagtggattatacgactcgtatcgtcttgcgtgagcaattggatgaaatcttagatactcttacagaccgtgaagaaaatgttctgcgtctacgttttggactagatgatggaaaaatgcgcacacttgaagatgtggggaaagtctttaacgtaactcgtgagcgtatccgtcagattgaagcaaaggctttgagaaaactacgccaaccaagtcgtagcaaaccgcttcgtgattttattgaagactaa

SEQ ID NO: 203 - protein, 369 aa, Streptococcus pneumoniae
MATKQKEVTTFDVQVAEFIRNHKQKGTATDDEINASLVIPFTLDADGIEDLLQRIQDAGISITDNEGNPSARVLSNEEEPELSDEDLIGSTSAKVNDPVRMYLKEIGVVPLLTNEEEKELALAVEAGDIEAKQRLAEANLRLVVSIAKRYVGRGMQFLDLIQEGNMGLMKAVDKFDYSKGFKFSTYATWWIRQAITRAIADQARTIRIPVHMVETINKLVREQRNLLQELGQDPTPEQIAERMDMTPDKVREILKIAQEPVSLETPIGEEDDSHLGDFIEDEVIENPVDYTTRIVLREQLDEILDTLTDREENVLRLRFGLDDGKMRTLEDVGKVFNVTRERIRQIEAKALRKLRQPSRSKPLRDFIED

SEQ ID NO: 204 - DNA, 1110 bp, Streptococcus pneumoniae
atggcaacaaaacaaaaagaagtaacaacatttgacgtacaggtagcagaatttatccgtaatcataagcaaaaagggacagcaacagatgatgaaatcaatgcaagtttggttattccttttaccttggacgctgatgggattgaagatctcttgcaacggattcaggatgcaggaatttctatcacagataacgaaggaaatccaagtgcgcgtgttctcagcaatgaagaagaaccagaacttagcgatgaggacttgattgggtcaacttctgctaaggtcaatgaccctgtccgtatgtacttgaaagaaataggggtcgttcctctcttgaccaatgaagaggagaaagagttggcactggctgttgaagctggtgatatcgaagccaaacaacgtcttgcggaacgcaatcttcgtttggttgtttccattgccaaacgctatgtcggtcgtggcatgcagttccttgacttgattcaagaaggaaatatgggcttgatgaaggcggttgacaagtttgactattctaaagggttcaagttttcaacttatgcaacttggtggattcgtcaggctatcactcgtgctattgcggaccaagctcgtaccatccgtatcccagttcacatggttgaaactatcaataaattggttcgtgaacagcggaatctccttcaagaattggggcaagatccgacaccagaacagattgctgaacgaatggatatgacacctgataaggttcgtgaaatcttgaagattgcccaagaaccagtatctcttgaaactcctatcggtgaagaggacgatagccaccttggagactttatcgaagatgaagtgattgaaaatccagtggattatacgactcgtatcgtcttgcgtgagcaattggatgaaatcttagatactcttacagaccgtgaagaaaatgttctgcgtctacgttttggactagatgatggaaaaatgcgcacacttgaagatgtggggaaagtctttaacgtaactcgtgagcgtatccgtcagattgaagcaaaggctttgagaaaactacgccaaccaagtcgtagcaaaccgcttcgtgattttattgaagactaa

SEQ ID NO: 205 - protein, 369 aa, Streptococcus pneumoniae
MATKQKEVTTFDVQVAEFIRNHKQKGTATDDEINASLVIPFTLDADGIEDLLQRIQDAGISITDNEGNPSARVLSNEEEPELSDEDLIGSTSAKVNDPVRMYLKEIGVVPLLTNEEEKELALAVEAGDIEAKQRLAERNLRLVVSIAKRYVGRGMQFLDLIQEGNMGLMKAVDKFDYSKGFKFSTYATWWIRQAITRAIADQARTIRIPVHMVETINKLVREQRNLLQELGQDPTPEQIAERMDMTPDKVREILKIAQEPVSLETPIGEEDDSHLGDFIEDEVIENPVDYTTRIVLREQLDEILDTLTDREENVLRLRFGLDDGKMRTLEDVGKVFNVTRERIRQIEAKALRKLRQPSRSKPLRDFIED

SEQ ID NO: 206 - DNA, 34 bp, Streptococcus pneumoniae
gcggcggcccatatggcaacaaaacaaaaagaag

SEQ ID NO: 207 - DNA, 32 bp, Streptococcus pneumoniae
gcgcggatccgtcttcaataaaatcacgaagc

SEQ ID NO: 208 - protein, 13 aa, Streptococcus pneumoniae
RMYLKEIGVVPLL

SEQ ID NO: 209 - protein, 14 aa, Streptococcus pneumoniae
EANLRLVVSIAKRY

SEQ ID NO: 210 - protein, 9 aa, Streptococcus pneumoniae
ASLVIPFTL

SEQ ID NO: 211 - DNA, 1977 bp, Streptococcus pneumoniae
atgtcaaatctatctgttaatgcaattcgttttctaggtattgacgccattaataaagccaactcaggtcatccaggtgtggttatgggagcggctccgatggcttacagcctctttacaaaacaacttcatatcaatccagctcaaccaaactggattaaccgcgaccgctttattctttcagcaggtcatggttcaatgctcctttatgctcttcttcacctttctggttttgaagatgtcagcatggatgagattaagagtttccgtcaatggggttcaaaaacaccaggtcacccagaatttggtcatacggcagggattgatgctacgacaggtcctctagggcaagggatttcaactgctactggttttgcccaagcagaacgtttcttggcagccaaatataaccgtgaaggttacaatatctttgaccactatacttacgttatctgtggagacggagacttgatggaaggtgtctcaagcgaggcagcttcatacgcaggcttgcaaaaacttgataagttggttgttctttatgattcaaatgatatcaacttggatggtgagacaaaggattcctttacagaaagtgttcgtgaccgttacaatgcctacggttggcatactgccttggttgaaaatggaacagacttggaagccatccatgctgctatcgaaacagcaaaagcttcaggcaagccatctttgattgaagtgaagacggttattggatacggttctccaaacaaacaaggaactaatgctgtacacggcgcccctcttggagcagatgaaactgcatcaactcgtcaagccctcggttgggactacgaaccatttgaaattccagaacaagtatatgctgatttcaaagaacatgttgcagaccgtggcgcatcagcttatcaagcttggactaaattagttgcagattataaagaagctcatccagaactggctgcagaagtagaagccatcatcgacggacgtgatccagtcgaagtgactccagcagacttcccagctttagaaaatggtttttctcaagcaactcgtaattcaagtcaagatgccttgaatgttgtggcagctaaattaccaacctttctaggtggatcagctgaccttgctcactcaaacatgacttatatcaagacggatggacttcaagacgatgccaatcgcttgaatcgtaacattcagtttggtgttcgtgaatttgcaatgggaacaatcttgaacgggatggcccttcatggtggacttcgtgtatacggtggaactttcttcgtcttctctgactatgtgaaggcagctgtccgcttgtcagccttacaaggacttcctgtgacttatgtctttacccatgattcaatcgcagttggggaagatggtccgactcatgaaccagttgagcatttagcaggtcttcgtgctatgccaaatctaaatgttttccgtccagcagatgcgcgtgaaacgcaagcagcttggtaccttgcagtgacaagtgagaaaacaccaactgcccttgtcttgacacgtcaaaatttgactgttgaagatggaacagacttcgacaaggttgctaaaggtgcttatgttgtatatgaaaatgcagccgactttgataccatcttgattgcgacaggttcagaggttaatcttgctgtctcagctgctaaagaattggctagtcaaggcgaaaaaatccgcgtagtcagcatgccatctacagatgtctttgataaacaagatgcagcttacaaggaagaaattcttccaaatgcagtccgccgtcgtgttgcagtcgaaatgggtgcaagtcaaaactggtacaaatatgttggtctcgatggtgccgttctaggtattgataccttcggagcctctgccccagcaccaaaagtattggcagaatatggctttactgtagaaaatcttgtaaaagttgttcgaaacttgaaataa

SEQ ID NO: 212 - protein, 658 aa, Streptococcus pneumoniae
MSNLSVNAIRFLGIDAINKANSGHPGVVMGAAPMAYSLFTKQLHINPAQPNWINRDRFILSAGHGSMLLYALLHLSGFEDVSMDEIKSFRQWGSKTPGHPEFGHTAGIDATTGPLGQGISTATGFAQAERFLAAKYNREGYNIFDHYTYVICGDGDLMEGVSSEAASYAGLQKLDKLVVLYDSNDINLDGETKDSFTESVRDRYNAYGWHTALVENGTDLEAIHAAIETAKASGKPSLIEVKTVIGYGSPNKQGTNAVHGAPLGADETASTRQALGWDYEPFEIPEQVYADFKEHVADRGASAYQAWTKLVADYKEAHPELAAEVEAIIDGRDPVEVTPADFPALENGFSQATRNSSQDALNVVAAKLPTFLGGSADLAHSNMTYIKTDGLQDDANRLNRNIQFGVREFAMGTILNGMALHGGLRVYGGTFFVFSDYVKAAVRLSALQGLPVTYVFTHDSIAVGEDGPTHEPVEHLAGLRAMPNLNVFRPADARETQAAWYLAVTSEKTPTALVLTRQNLTVEDGTDFDKVAKGAYVVYENAADFDTILIATGSEVNLAVSAAKELASQGEKIRVVSMPSTDVFDKQDAAYKEEILPNAVRRRVAVEMGASQNWYKYVGLDGAVLGIDTFGASAPAPKVLAEYGFTVENLVKVVRNLK

SEQ ID NO: 213 - DNA, 1977 bp, Streptococcus pneumoniae
atgtcaaatctatctgttaatgcaattcgttttctaggtattgacgccattaataaagccaactcaggtcatccaggtgtggttatgggagcggctccgatggcttacagcctctttacaaaacaacttcgtatcaatccagctcaaccaaactggattaaccgcgaccgctttattctttcagcaggtcatggttcaatgctcctttatgctcttcttcacctttctggttttgaagatgtcagcatggatgagattaagagcttccgtcaatggggttcaaaaacaccaggtcacccagaatttggtcatacggcagggattgatgctacgacaggtcctatagggcaagggatttcaactgctactggttttgctcaagcagaacgtttcttggcagccaaatataaccgtgaaggctacaatatctttgaccactatacttacgttatctgtggagacggagacttgatggaaggtgtctcaagcgaggcagcttcatatgcaggcttgcaaaaacttgataagttggttgttctttatgattcaaatgacatcaacttggatggtgagacaaaggattcctttacagaaagtgttcgtgaccgttacaatgcctacggttggcatactgccttggttgaaaatggaacagacttggaagccatccatgctgctatcgaaacagcaaaagcttcaggcaagccatctttgattgaagtgaagacggttattggatacggttctccaaacaaacaaggaactaatgctgtacacggcgcccctcttggagcagatgaaactgcatcaactcgtcaagccctcggttgggactacgaaccatttgaaattccagaacaagtatatgctgatttcaaagaacatgttgcagaccgtggcgcatcagcttatcaagcttggactaaattagttgcagattataaagaagctcatccagaactggctgcagaagtagaagccatcatcgacggacgtgatccagtcgaagtgactccagcagacttcccagctttagaaaatggtttttctcaagcaactcgtaattcaagtcaagatgccttgaatgttgtggcagctaaattaccaacctttctaggtggatcagctgaccttgctcactcaaacatgacttatatcaagacggatggacttcaagacgatgccaatcgcttgaatcgtaacattcagtttggtgttcgtgaatttgcaatgggaacaatcttgaacgggatggcccttcatggtgggcttcgtgtatacggtggaactttcttcgtcttctctgactatgcgaaggcagctgtccgcttgtcagccttacaaggacttcctgtgacttatgtctttacccatgattcaatcgcagttggggaagatggtccgactcacgaaccagttgagcatttagcaggtcttcgtgctatgccaaatctaaatgtttttcgtccagcagatgcgcgtgaaacgcaagcagcttggtaccttgcagtgacaagtgagaaaacaccaactgcccttgtcttgacacgtcaaaacttgactgtcgaagagggaacagacttcgacaaggttgctaaaggtgcttatgttgtatatgaaaatgcagccgactttgataccatcttgattgcgacaggttcagaggttaatcttgctgtctcagctgctaaagaattggctagtcaaggcgaaaacatccgcgtagtcagcatgccatctacagatgtctttgataaacaagatgcagcttacaaggaagaaattcttccaaatgcagtccgccgtcgtgttgcagtcgaaatgggtgcaagtcaaaactggtacaaatatgttggtctcgatggtgccgttctaggtattgataccttcggagcctctgccccagcaccaaaagtattggcagaatatggctttactgtagaaaatcttgtaaaagttgttcgaaacttgaaataa

SEQ ID NO: 214 - protein, 658 aa, Streptococcus pneumoniae
MSNLSVNAIRFLGIDAINKANSGHPGVVMGAAPMAYSLFTKQLRINPAQPNWINRDRFILSAGHGSMLLYALLHLSGFEDVSMDEIKSFRQWGSKTPGHPEFGHTAGIDATTGPIGQGISTATGFAQAERFLAAKYNREGYNIFDHYTYVICGDGDLMEGVSSEAASYAGLQKLDKLVVLYDSNDINLDGETKDSFTESVRDRYNAYGWHTALVENGTDLEAIHAAIETAKASGKPSLIEVKTVIGYGSPNKQGTNAVHGAPLGADETASTRQALGWDYEPFEIPEQVYADFKEHVADRGASAYQAWTKLVADYKEAHPELAAEVEAIIDGRDPVEVTPADFPALENGFSQATRNSSQDALNVVAAKLPTFLGGSADLAHSNMTYIKTDGLQDDANRLNRNIQFGVREFAMGTILNGMALHGGLRVYGGTFFVFSDYAKAAVRLSALQGLPVTYVFTHDSIAVGEDGPTHEPVEHLAGLRAMPNLNVFRPADARETQAAWYLAVTSEKTPTALVLTRQNLTVEEGTDFDKVAKGAYVVYENAADFDTILIATGSEVNLAVSAAKELASQGENIRVVSMPSTDVFDKQDAAYKEEILPNAVRRRVAVEMGASQNWYKYVGLDGAVLGIDTFGASAPAPKVLAEYGFTVENLVKVVRNLK

SEQ ID NO: 215 - DNA, 35 bp, Streptococcus pneumoniae
gcggcggcccatatgtcaaatctatctgttaatgc

SEQ ID NO: 216 - DNA, 34 bp, Streptococcus pneumoniae
gcgcggatcctttcaagtttcgaacaacttttac

SEQ ID NO: 217 - protein, 15 aa, Streptococcus pneumoniae
GSMLLYALLHLSGFE

SEQ ID NO: 218 - protein, 22 aa, Streptococcus pneumoniae
SSEAASYAGLQKLDKLVVLYDS

SEQ ID NO: 219 - protein, 12 aa, Streptococcus pneumoniae
IFDHYTYVICGD

SEQ ID NO: 220 - DNA, 1347 bp, Pseudomonas aeruginosa
atgactactcgtatcctgaccggcatcactcctaccggcactccgcacctgggcaactacgccggcgccatccgcccggcgatcctcgccagccgtcggagcgacgtggattcgttctacttcctggcggactaccacgccttgatcaagtgcgacgatcccgctcgtatccagcgctcgcgcctggaaatcgccgcgacctggctggccggcggcctggacgtcgagcgtgcgaccttctaccggcagtcggacatccccgagattcccgagctgacctggttgctcacctgcgtcagtgccaagggcctgctcaaccgcgcgcatgcctacaaggccgcggtggaccgcaatgtcgaggccggcgaagacccggacgccggcgtgaccatgggcctctacagctatccggtgctgatggccgcggacatcctgatgttcaacgcgcacaagattccggtcggccgcgaccaggtgcagcacgtggagatggcccgcgacatcggccagcgtttcaaccacctgttcggcaacggccgcgagttcttcgtcctgcccgaagcggtgatcgaggaaaacgtcgccaccctgccgggcctggacgggcgcaagatgtccaagagctacgacaacaccatcccgctgttcagcccgtccaggcagctcaaggacgccatcgcacgcatcgtcaccgactcgcgcgcgccgggcgagccgaaagacccggacagttcgcacctgttccttctttactcggccttcgccagcgccgaacaggtcgccgcgttccgccaggaactgctcgaaggcctggcctggggcgaagccaagcagcgcctgttccagttgctcgacaacgaactgggcgaggctcgcgagcgttaccaggcgctgatcgccaagccggacgatatcgaggacattctcctcgcaggtgccgccaaggcgcgccgcatcgccaccccattcatcgccgagttgcgcgaggcagtcggcctgcgctccctgcgcgagccgctgaaaagtgccgagagcggcaagaagaaggccgccaaggctgcgcgcctggtcagcttccgcgacgacgacggcagcttccgcttccgcctgctggacgccgccggcgaacagctactgctgtcccgcgccttcgccgacggcaaggccgccggtgcggtgagcaagcgcctgctggctggcgagactgccgacctgcgggccgagggcaatgcctttggcctgtggctggatggcgaggcggtggcgcagagcccggccttcgccgacgccgccgcccgtgacgccgccatcgagcgcacccgcgaagcgctggcaccgcaggagtag

SEQ ID NO: 221 - protein, 448 aa, Pseudomonas aeruginosa
MTTRILTGITPTGTPHLGNYAGAIRPAILASRRSDVDSFYFLADYHALIKCDDPARIQRSRLEIAATWLAGGLDVERATFYRQSDIPEIPELTWLLTCVSAKGLLNRAHAYKAAVDRNVEAGEDPDAGVTMGLYSYPVLMAADILMFNAHKIPVGRDQVQHVEMARDIGQRFNHLFGNGREFFVLPEAVIEENVATLPGLDGRKMSKSYDNTIPLFSPSRQLKDAIARIVTDSRAPGEPKDPDSSHLFLLYSAFASAEQVAAFRQELLEGLAWGEAKQRLFQLLDNELGEARERYQALIAKPDDIEDILLAGAAKARRIATPFIAELREAVGLRSLREPLKSAESGKKKAAKAARLVSFRDDDGSFRFRLLDAAGEQLLLSRAFADGKAAGAVSKRLLAGETADLRAEGNAFGLWLDGEAVAQSPAFADAAARDAAIERTREALAPQE

SEQ ID NO: 222 - DNA, 1347 bp, Pseudomonas aeruginosa
atgactactcgtatcctgaccggcatcactcctaccggcactccgcacctgggcaactacgccggcgccatccgcccggcgatcctcgccagccgtcggagcgacgtggattcgttctacttcctggcggactaccacgccttgatcaagtgtgacgatcccgctcgtatccagcgctcgcgcctggaaatcgccgcgacctggctggccggcggcctggacgtcgagcgtgcgaccttctaccggcagtcggacatccccgagattcccgagctgacctggttgctcacctgcgtcagtgccaagggtctgctcaaccgcgcgcatgcctacaaggccgcggtggaccgcaatgtcgaggctggcgaagacccggacgccggcgtgaccatgggcctctacagctatccggtgctgatggccgcggacatcctgatgttcaacgcgcacaagatcccggtcggccgcgaccaggtgcagcacgtggagatggcccgcgacatcggccagcgtttcaaccacctgttcggcaacggccgcgagttcttcgtcctgcccgaagcggtgattgaggaaaacgtcgccaccctgccgggcctggacgggcgcaagatgtccaagagctacgacaacaccatcccgctgttcagcccgtccaggcagctcaaggacgccatcgcacgcatcgtcaccgactcgcgcgcgccgggcgagccgaaagaaccggacagttcgcacctgttccttctttactcggccttcgccagcgccgaacaggtcgccgcgttccgccaggaactgctcgaaggcctggcctggggcgaagccaagcagcgcctgttccagttgctcgacaacgaactgggcgaggctcgcgagcgttaccaggcgctgatcgccaagccggacgatatcgaggacattctcctcgcaggtgccgccaaggcgcgccgcatcgccaccccattcatcgccgagttgcgcgaggcagtcggcctgcgctccctgcgcgagccgctgaaaagtcccgagaacggcaagaagaaggctgtcaaagctgcatttctggtcagcttccgcgacgacgacggcagcttccgcttccgcctgctggacgccgccggcgaacagctactgctgtcccgcgccttcgccgacggcaaggccgccggtgcggtgagcaagcgcctgctggctggcgagactgccgacctgcgggccgagggcaatgcctttggcctgtggctggatggcgaggcggtggcgcagagcccggccttcgccgacgccgccgcccgtgacgccgccatcgagcgcacccgcgaagcgctggcaccgcaggagtag

SEQ ID NO: 223 - protein, 448 aa, Pseudomonas aeruginosa
MTTRILTGITPTGTPHLGNYAGAIRPAILASRRSDVDSFYFLADYHALIKCDDPARIQRSRLEIAATWLAGGLDVERATFYRQSDIPEIPELTWLLTCVSAKGLLNRAHAYKAAVDRNVEAGEDPDAGVTMGLYSYPVLMAADILMFNAHKIPVGRDQVQHVEMARDIGQRFNHLFGNGREFFVLPEAVIEENVATLPGLDGRKMSKSYDNTIPLFSPSRQLKDAIARIVTDSRAPGEPKEPDSSHLFLLYSAFASAEQVAAFRQELLEGLAWGEAKQRLFQLLDNELGEARERYQALIAKPDDIEDILLAGAAKARRIATPFIAELREAVGLRSLREPLKSPENGKKKAVKAAFLVSFRDDDGSFRFRLLDAAGEQLLLSRAFADGKAAGAVSKRLLAGETADLRAEGNAFGLWLDGEAVAQSPAFADAAARDAAIERTREALAPQE

SEQ ID NO: 224 - DNA, 32 bp, Pseudomonas aeruginosa
gcggcggcccatatgactactcgtatcctgac

SEQ ID NO: 225 - DNA, 27 bp, Pseudomonas aeruginosa
gcgcggatccctcctgcggtgccagcg

SEQ ID NO: 226 - protein, 19 aa, Pseudomonas aeruginosa
TMGLYSYPVLMAADILMFN

SEQ ID NO: 227 - protein, 17 aa, Pseudomonas aeruginosa
LTWLLTCVSAKGLLNRA

SEQ ID NO: 228 - protein, 8 aa, Pseudomonas aeruginosa
FFVLPEAV

SEQ ID NO: 229 - DNA, 354 bp, Enterococcus faecalis
atgataaagggaattggtattgacgcagtagaattaagtcggataaaaccgattgttgaaaaacaaggatcgtttattcaacgggttttaacacctaacgaattgaccctttttgaaaagttatctacaaaacgtcaaatagaatttttagctggtcgttttgcttgtaaagaagcgttttctaaagcatggggcacagggattggcaaggttggtttacaagatattgaggtgctgactgaaaaaacaggtgcaccatacgtagcaaactcgccccataatggtaaagtgtttgtctcgattacgcacacagaaactatggcgattgcacaaattgttttagaaagcgaatga

SEQ ID NO: 230 - protein, 117 aa, Enterococcus faecalis
MIKGIGIDAVELSRIKPIVEKQGSFIQRVLTPNELTLFEKLSTKRQIEFLAGRFACKEAFSKAWGTGIGKVGLQDIEVLTEKTGAPYVANSPHNGKVFVSITHTETMAIAQIVLESE

SEQ ID NO: 231 - DNA, 354 bp, Enterococcus faecalis; identical to SEQ ID NO: 229

SEQ ID NO: 232 - protein, 117 aa, Enterococcus faecalis; identical to SEQ ID NO: 230

SEQ ID NO: 233 - DNA, 34 bp, Enterococcus faecalis
gcggcggcccatatgataaagggaattggtattg

SEQ ID NO: 234 - DNA, 35 bp, Enterococcus faecalis
gcgcggatccgctttctaaaacaatttgtgcaatc

SEQ ID NO: 235 - protein, 6 aa, Enterococcus faecalis
IAQIVL

SEQ ID NO: 236 - protein, 9 aa, Enterococcus faecalis
NGKVFVSIT

SEQ ID NO: 237 - protein, 12 aa, Enterococcus faecalis
SFIQRVLTPNEL

SEQ ID NO: 238 - DNA, 822 bp, Enterococcus faecalis
atgagcaatcaagaagccattggattaattgattctggcgttggtggattaactgttttaaaggaagcgctaaaacaattaccaaatgaacgattaatttatttaggagatacagcccgttgcccatatggtccacgaccagccgaacaagtcgttcagtttacttgggaaatggccgattttttattgaaaaaacgaataaaaatgctagtaatcgcatgtaataccgcgacggctgtcgcattagaagaaattaaagctgccttgccaattccagttgtcggtgttattttacctggcgcacgagcagccgttaaagtcacaaaaaataacaagattggtgtcataggtacgttagggacaatcaaaagtgcttcctatgaaatcgccattaaaagtaaggcaccaacaattgaggtgactagtttagattgccctaaatttgtccccattgttgaaagtaatcaatatcgttcttccgtagcaaaaaaaattgtggcagaaacacttcaagcactacaattaaaaggacttgatacgttgattttaggttgtacccattacccgttgttacgtccggtgattcaaaatgtgatggggagtcatgtgacattaattgactcaggagccgaaacagttggcgaagtcagcatgcttctcgattattttgacattgcccacacgcctgaagcgcctacacagccccatgaattttatacaactggttctgcaaaaatgtttgaagagattgcaagcagttggcttggtatagagaacttaaaagcacaacagattcacttaggaggaaacgaaaatgattga

SEQ ID NO: 239 - protein, 273 aa, Enterococcus faecalis
MSNQEAIGLIDSGVGGLTVLKEALKQLPNERLIYLGDTARCPYGPRPAEQVVQFTWEMADFLLKKRIKMLVIACNTATAVALEEIKAALPIPVVGVILPGARAAVKVTKNNKIGVIGTLGTIKSASYEIAIKSKAPTIEVTSLDCPKFVPIVESNQYRSSVAKKIVAETLQALQLKGLDTLILGCTHYPLLRPVIQNVMGSHVTLIDSGAETVGEVSMLLDYFDIAHTPEAPTQPHEFYTTGSAKMFEEIASSWLGIENLKAQQIHLGGNEND

SEQ ID NO: 240 - DNA, 822 bp, Enterococcus faecalis; identical to SEQ ID NO: 238

SEQ ID NO: 241 - protein, 273 aa, Enterococcus faecalis; identical to SEQ ID NO: 239

SEQ ID NO: 242 - DNA, 33 bp, Enterococcus faecalis
cgcggggtaccatgagcaatcaagaagccattg

SEQ ID NO: 243 - DNA, 31 bp, Enterococcus faecalis
gcgcggatccattttcgtttcctcctaagtg

SEQ ID NO: 244 - protein, 41 aa, Enterococcus faecalis
KMLVIACNTATAVALEEIKAALPIPVVGVILPGARAAVKVT

SEQ ID NO: 245 - protein, 41 aa, Enterococcus faecalis
RSSVAKKIVAETLQALQLKGLDTLILGCTHYPLLRPVIQNV

SEQ ID NO: 246 - protein, 19 aa, Enterococcus faecalis
TIEVTSLDCPKFVPIVESN

SEQ ID NO: 247 - DNA, 795 bp, Streptococcus pneumoniae
atggataatcgaccaattggttttttggattcgggtgtcgggggcttgaccgttgtgcgcgagctcatgcgccagcttccccatgaagaaatcgtctatattggagattcggcgcgggcgccctatggcccccgtcctgctgagcaaattcgtgaatatacttggcagctggtcaactttctcttgaccaaggatgtcaaaatgattgtcattgcttgtaacactgcgactgcggtcgtctgggaagaaatcaaggctcaactagatattcctgtcttgggtgtaattttgccaggagcttcggcagccatcaagtccagtcaaggtgggaaaatcggagtgattggaacgcccatgacggtacaatcagacatataccgtcagaaaatccatgatctggatcccgacttacaggtggagagcttggcctgtcccaagtttgctcccttggttgagtcaggtgccctgtcaaccagtgttaccaagaaggtggtctatgaaaccctgcgtcccttggttggaaaggtggatagcctgattttgggctgtactcattatccactccttcgccctattatccaaaatgtgatggggccaaaggttcagctcatcgatagtggggcagagtgcgtacgggatatctcagtcttactcaattattttgaaatcaatcgtggtcgcgatgctggaccactccatcaccgtttttacacaacagccagtagccaaagttttgcacaaattggtgaagaatggctggaaaaagagattcatgtggagcatgtagaattatga

SEQ ID NO: 248 - protein, 264 aa, Streptococcus pneumoniae
MDNRPIGFLDSGVGGLTVVRELMRQLPHEEIVYIGDSARAPYGPRPAEQIREYTWQLVNFLLTKDVKMIVIACNTATAVVWEEIKAQLDIPVLGVILPGASAAIKSSQGGKIGVIGTPMTVQSDIYRQKIHDLDPDLQVESLACPKFAPLVESGALSTSVTKKVVYETLRPLVGKVDSLILGCTHYPLLRPIIQNVMGPKVQLIDSGAECVRDISVLLNYFEINRGRDAGPLHHRFYTTASSQSFAQIGEEWLEKEIHVEHVEL

SEQ ID NO: 249 - DNA, 795 bp, Streptococcus pneumoniae; identical to SEQ ID NO: 247

SEQ ID NO: 250 - protein, 264 aa, Streptococcus pneumoniae; identical to SEQ ID NO: 248

SEQ ID NO: 251 - DNA, 39 bp, Streptococcus pneumoniae
gcggcggcccatatggataatcgaccaattggttttttg

SEQ ID NO: 252 - DNA, 31 bp, Streptococcus pneumoniae
gcgcagatcttaattctacatgctccacatg

SEQ ID NO: 253 - protein, 22 aa, Streptococcus pneumoniae
KAQLDIPVLGVILPGASAAIKS

SEQ ID NO: 254 - protein, 41 aa, Streptococcus pneumoniae
LSTSVTKKVVYETLRPLVGKVDSLILGCTHYPLLRPIIQNV

SEQ ID NO: 255 - protein, 24 aa, Streptococcus pneumoniae
GPKVQLIDSGAECVRDISVLLNYF

SEQ ID NO: 256 - DNA, 2160 bp, Streptococcus pneumoniae
ttgagtctaaaagaaattaaagatgtcagctatttcaaactgaataacgagattaaccgtcctgttgatggtcaaatccctttaaataaagataaagaagcactcgcagccttctttaaagaaaatgtagaaccgaatacacgtaaattcagctctgctgaagaaaaaatcaactttttaatgaaagaagattttattgaaactgaattcatcgaaaaatattcaatggactttattgaaaaattatatgctttcttagatgaacaacatttccaattcaagtctttcatggcggcttataaattttattctcaatacgctttaaagaacaacgccggaacagagtatttagaaacatatgaagatcgggttgcctttaatgccttgtattttgcggatggcgatgaagagttggctttaacattggcggatgaaatgatccatcaacggtatcaaccagccacaccttctttcttaaacgctgggcgtaaacgtcgaggtgaattggtttcttgtttcttagttcaagtaacagatgatatgaacagcattgggcgttcaattaattctgcccttcaattatcacgaatcggcggcggcgtaggaattactctttccaacttacgtgaagcgggcgcaccaatcaaaggttatgatggcgcagcaagtggtgttgtccctgttatgaaattatttgaagatagctttagctactctaaccaactaggtcaacgtcaaggtgctggtgtggtttatctaaatgtcttccatccagatattgaaatgttcttatctgctaaaaaagaaaacgctgatgaaaaaatccgtgtaaaaacgttgtctcttggtgttattgttccagataaattttacgaattaacacgtaacaacgaagatatgtatttatttagtccttatagtgtggaacgtgaatatggtgtgccttattcctatgtagatattaccaaagaatatgataacctagtggccaatccaaacatacgtaaacgtaaaattaaagcccgtgacttagaaaatgaaatttctaaattacaacaagaatctggctatccttatatcatcaatattgatacagctaacaaaaacaatccgattgatggcaagattatcatgagtaacttatgttctgaaattcttcaagttcaaacgccttctgttattaatgggaaacaagaatatgaagttttaggaacagatattagttgtaacttaggttcaactaacattgttaatttaatggaaagtcctgactttggaaaatctgtccgcgctatgacgcgtgcgttaacttttgtaacagatgcttctgaaattgatgtcgtgccaactatccaaaatggaaatcgtttaagccatacaatcggactaggcgcaatgggcttacacaccttcttcgctaaaaatcatatggaatacggctctgaagaatcattagactttacagacatttatttcatgttattaaattactggactttaatggaaagtaaccaaattgcgaaagaacgtaaccaagtcttccataattttgaaaaatcagattatgcttctggtgcttacttcgataaatatattgaaggcaactttacaccaaaatttgataaagtgaaagaaattttcaaagacattcagattccaacggctgaagattgggctgcgttacgcgatgctgtgaaaaaagatggtctttatcatcaaaatcgtttagccgtagcgccaaatggttcaatttcatatattaatgatactagtgccagcattcatccaattactcgtatgattgaagaacgtcaagagaagaaaattggtaagatttactatccagcgccttatttagctaatgatacaatcccttactatacttctgcttacgacatggatatgcgcaaagtgattgatgtctacgcaacagcgcaacaacacgttgatcaaggaatgagtttaaccttgtttatgcgttcagaaatccctgaaggcttgtatgaatggaaagaaacaccaaaacaaacaacccgtgacttgaacattttacgtcattatgcgttcaacaaagggattaaatcaatttactatattcgtacatttacagatgatgctgaagaaattggcagcaatcaatgtgagtcttgcgtgatttga

SEQ ID NO: 257 - protein, 719 aa, Streptococcus pneumoniae
LSLKEIKDVSYFKLNNEINRPVDGQIPLNKDKEALAAFFKENVEPNTRKFSSAEEKINFLMKEDFIETEFIEKYSMDFIEKLYAFLDEQHFQFKSFMAAYKFYSQYALKNNAGTEYLETYEDRVAFNALYFADGDEELALTLADEMIHQRYQPATPSFLNAGRKRRGELVSCFLVQVTDDMNSIGRSINSALQLSRIGGGVGITLSNLREAGAPIKGYDGAASGVVPVMKLFEDSFSYSNQLGQRQGAGVVYLNVFHPDIEMFLSAKKENADEKIRVKTLSLGVIVPDKFYELTRNNEDMYLFSPYSVEREYGVPYSYVDITKEYDNLVANPNIRKRKIKARDLENEISKLQQESGYPYIINIDTANKNNPIDGKIIMSNLCSEILQVQTPSVINGKQEYEVLGTDISCNLGSTNIVNLMESPDFGKSVRAMTRALTFVTDASEIDVVPTIQNGNRLSHTIGLGAMGLHTFFAKNHMEYGSEESLDFTDIYFMLLNYWTLMESNQIAKERNQVFHNFEKSDYASGAYFDKYIEGNFTPKFDKVKEIFKDIQIPTAEDWAALRDAVKKDGLYHQNRLAVAPNGSISYINDTSASIHPITRMIEERQEKKIGKIYYPAPYLANDTIPYYTSAYDMDMRKVIDVYATAQQHVDQGMSLTLFMRSEIPEGLYEWKETPKQTTRDLNILRHYAFNKGIKSIYYIRTFTDDAEEIGSNQCESCVI

SEQ ID NO: 258 - DNA, 2160 bp, Streptococcus pneumoniae; identical to SEQ ID NO: 256

SEQ ID NO: 259 - protein, 719 aa, Streptococcus pneumoniae; identical to SEQ ID NO: 257

SEQ ID NO: 260 - DNA, 36 bp, Streptococcus pneumoniae
cgcggggtaccatgagtctaaaagaaattaaagatg

SEQ ID NO: 261 - DNA, 32 bp, Streptococcus pneumoniae
gcgcggatcccacgcaagactcacattgattg

SEQ ID NO: 262 - protein, 12 aa, Streptococcus pneumoniae
GELVSCFLVQVT

SEQ ID NO: 263 - protein, 12 aa, Streptococcus pneumoniae
GAGVVYLNVFHP

SEQ ID NO: 264 - protein, 17 aa, Streptococcus pneumoniae
RVKTLSLGVIVPDKFYE

SEQ ID NO: 265 - DNA, 1254 bp, Enterococcus faecalis
atgaaagtgactgatttaaagcaactagggcaacaagctaaagaagcctcttatacgctaggcttgatggatactcgtcaaaaaaatactttgttaaacaaaatggccgcagccattgaagccaatgcaccccgcattttacaagcaaatgcattagatttagagcaagccgctacccacggaatttctgaaacaatgcaagaccgcttacgtttaacagaagaacggatcacagcgatggctgagggcatacgccaagtcgctactttacccgatccaattggggaagtagataaaatgtggcgcaatgaagcgggactgttaattgggcaacaacgcgtgcctttaggtgttattggaatcatttatgaatcgcggccaaacgtgacaacagatgccgctagcctttgtttcaaatcgggaaatgctgttattcttcgaggcggaaaagaagcgtttcactccaatcagatattggtgacaattttacaagaagcgctaatccaagaagccgtttctccccatctcattcaatttgttgatgatacttctagagaaacagcccaacaacttatgcgcttaaatgactacttggatgtcctcattccgcgtggcggcgccaacttaatcaaaactgttttgacaacagccactgttcctgttattgaaacgggcacgggcaattgtcatatttacgtggacaaagacgcccagttaacaatggcaactgaaattattgtcaatgctaaatgtcaacgtccttctgtctgtaacgccgccgaaacgttattaattcatcaagaggtggctgaagcctttttaccaacaattgaaaaagccttgaaggagtttcacgtggaacttcgggcagatgaacgtgcgttagcaatttttgaagaagccattccagcgactgaacaagattgggaaacggaatttctcgactttatcttagcagtgaaagtcgttgattctttggacgaagccatccagcatattaatcgctacaatacaaaacattctgaaagtattattagtgataattactttgccacacaacaatttttacaacaagtggatgcagccgctgtttatgcgaatgcttcaactcgtttcacggacggttttgaatttggatttggcgccgaaatcggcattagtacgcaaaaattacatgcccgtggacctatgggtctagcagagcttacttcgacaaaatatgttatttatggaaatgggcaagcacgttcttga

SEQ ID NO: 266 - protein, 417 aa, Enterococcus faecalis [sequence omitted]

SEQ ID NO: 267 - DNA, 1254 bp, Enterococcus faecalis
atgaaagtgactgatttaaagcaactagggcaacaagctaaagaagcctcttatacgctaggcttgatggatactcgtcaaaaaaatactttgttaaacaaaatggccgcagcatttgaagccaatgcaccccgcattttacaagcaaatgcattagatttagagcaagccgctacccacggaatttctgaaacaatgcaagaccgcttacgtttaacagaagaacggatcacagcgatggctgagggcatacgccaagtcgctactttacccgatccaattggggaagtagataaaatgtggcgcaatgaagcgggactgttaattgggcaacaacgcgtgcctttaggtgttattggaatcatttatgaatcgcggccaaacgtgacaacagatgccgctagcctttgtttcaaatcgggaaatgctgttattcttcgaggcggaaaagaagcgtttcactccaatcagatattggtgacaattttacaagaagcgctaatccaagaagccgtttctccccatctcattcaatttgttgatgatacttctagagaaacagcccaacaacttatgcgcttaaatgactacttggatgtcctcattccgcgtggcggcgccaacttaatcaaaactgttttgacaacagccactgttcctgttattgaaacgggcacgggcaattgtcatatttacgtggacaaagacgcccagttaacaatggcaactgaaattattgtcaatgctaaatgtcaacgtccttctgtctgtaacgccgccgaaacgttattaattcatcaagaggtggctgaagcctttttaccaacaattgaaaaagccttgaaggagtttcacgtggaacttcgggcagatgaacgtgcgttagcaatttttgaagaagccattccagcgactgaacaagattgggaaacggaatttctcgactttatcttagcagtgaaagtcgttgattctttggacgaagccatccagcatattaatcgctacaatacaaaacattctgaaagtattattagtgataattactttgccacacaacaatttttacaacaagtggatgcagccgctgtttatgcgaatgcttcaactcgtttcacggacggttttgaatttggatttggcgccgaaatcggcattagtacgcaaaaattacatgcccgtggacctatgggtctagcagagcttacttcgacaaaatatgttatttatggaaatgggcaagcacgttcttga

SEQ ID NO: 268 - protein, 417 aa, Enterococcus faecalis
MKVTDLKQLGQQAKEASYTLGLMDTRQKNTLLNKMAAAFEANAPRILQANALDLEQAATHGISETMQDRLRLTEERITAMAEGIRQVATLPDPIGEVDKMWRNEAGLLIGQQRVPLGVIGIIYESRPNVTTDAASLCFKSGNAVILRGGKEAFHSNQILVTILQEALIQEAVSPHLIQFVDDTSRETAQQLMRLNDYLDVLIPRGGANLIKTVLTTATVPVIETGTGNCHIYVDKDAQLTMATEIIVNAKCQRPSVCNAAETLLIHQEVAEAFLPTIEKALKEFHVELRADERALAIFEEAIPATEQDWETEFLDFILAVKVVDSLDEAIQHINRYNTKHSESIISDNYFATQQFLQQVDAAAVYANASTRFTDGFEFGFGAEIGISTQKLHARGPMGLAELTSTKYVIYGNGQARS

SEQ ID NO: 269 - DNA, 34 bp, Enterococcus faecalis
gcggcggcccatatgaaagtgactgatttaaagc

SEQ ID NO: 270 - DNA, 37 bp, Enterococcus faecalis
gcgcggatccacgtgcttgcccatttccataaataac

SEQ ID NO: 271 - protein, 20 aa, Enterococcus faecalis
LDFILAVKVVDSLDEAIQHI

SEQ ID NO: 272 - protein, 37 aa, Enterococcus faecalis
EIIVNAKCQRPSVCNAAETLLIHQEVAEAFLPTIEKA

SEQ ID NO: 273 - protein, 11 aa, Enterococcus faecalis
LNDYLDVLIPR

SEQ ID NO: 274 - DNA, 756 bp, Enterococcus faecalis
atgcgcaaaccaattatcgctggtaactggaaaatgaacaaaactttaagcgaagcacaaagctttgcagaagcagtaaaaaatgctgttccatcaaacgacgttgttgacgctgtgattggatctccagcattattcttagctcctttagcttggaacctaaaagattctgaagtgaaattagctgcacaaaactgctactgggaaaacgctggtgccttcactggtgaaaactcaccagctgcaattgcagatttaggtgtagactatgtgattatcggacactctgaacgtcgcgaatatttccacgaaacagatgaagatatcaataaaaaagccaaagcaatctttgcaaatggtatgacaccaatcttctgttgtggtgaaactttagaaacgtatgaagctggtaaaacagcggaatggatcgaaggtcaaatcactaaaggcttagttggtttatcaaacgaacaagttgcttcaatggttatcgcttacgaaccaatttgggcaatcggaactggtaaatctgcagatgctaatattgcagatgaaatctgtggtgttgttcgttcaacagttgaaaaattatacggcaaagaagtttctgaagctgttcgtattcaatacggtggttctgttaaaccagaaaacatcgctgaatatatggcaaaagaaaacgttgacggtgctttagtcggcggcgcaagcttagaagcagattcattcctagctttattagatgctgtaaaatga

SEQ ID NO: 275 - protein, 251 aa, Enterococcus faecalis
MRKPIIAGNWKMNKTLSEAQSFAEAVKNAVPSNDVVDAVIGSPALFLAPLAWNLKDSEVKLAAQNCYWENAGAFTGENSPAAIADLGVDYVIIGHSERREYFHETDEDINKKAKAIFANGMTPIFCCGETLETYEAGKTAEWIEGQITKGLVGLSNEQVASMVIAYEPIWAIGTGKSADANIADEICGVVRSTVEKLYGKEVSEAVRIQYGGSVKPENIAEYMAKENVDGALVGGASLEADSFLALLDAVK

SEQ ID NO: 276 - DNA, 756 bp, Enterococcus faecalis; identical to SEQ ID NO: 274

SEQ ID NO: 277 - protein, 251 aa, Enterococcus faecalis; identical to SEQ ID NO: 275

SEQ ID NO: 278 - DNA, 32 bp, Enterococcus faecalis
gcggcggcccatatgcgcaaaccaattatcgc

SEQ ID NO: 279 - DNA, 32 bp, Enterococcus faecalis
gcgcggatcctacagcatctaataaagctagg

SEQ ID NO: 280 - protein, 10 aa, Enterococcus faecalis
EADSFLALLD

SEQ ID NO: 281 - protein, 22 aa, Enterococcus faecalis
SNDVVDAVIGSPALFLAPLAWN

SEQ ID NO: 282 - protein, 14 aa, Enterococcus faecalis
DEICGVVRSTVEKL

SEQ ID NO: 283 - DNA, 780 bp, Streptococcus pneumoniae
ttgaaaaaagaggtatgtgaaatgtcacgtaaaccatttatcgctggtaactggaaaatgaacaaaaatccagaagaagctaaagcattcgttgaagcagttgcatcaaaacttccttcatcagatcttgttgaagcaggtatcgctgctccagctcttgatttgacaactgttcttgctgttgcaaaaggctcaaaccttaaagttgctgctcaaaactgctactttgaaaatgcaggtgctttcactggtgaaactagcccacaagttttgaaagaaatcggtactgactacgttgttatcggtcactcagaacgccgtgactacttccatgaaactgatgaagatatcaacaaaaaagcaaaagcaatctttgcgaacggtatgcttccaatcatctgttgtggtgaatcacttgaaacttacgaagctggtaaagctgctgaattcgtaggtgctcaagtatctgctgcattggctggattgactgctgaacaagttgctgcctcagttatcgcttatgagccaatctgggctatcggtactggtaaatcagcttcacaagacgatgcacaaaaaatgtgtaaagttgttcgtgacgttgtagctgctgactttggtcaagaagtcgcagacaaagttcgtgttcaatacggtggttctgttaaacctgaaaatgttgcttcatacatggcttgcccagacgttgacggtgcccttgtaggtggtgcgtcacttgaagctgaaagcttcttggctttgcttgactttgtaaaataa

SEQ ID NO: 284 - protein, 259 aa, Streptococcus pneumoniae
LKKEVCEMSRKPFIAGNWKMNKNPEEAKAFVEAVASKLPSSDLVEAGIAAPALDLTTVLAVAKGSNLKVAAQNCYFENAGAFTGETSPQVLKEIGTDYVVIGHSERRDYFHETDEDINKKAKAIFANGMLPIICCGESLETYEAGKAAEFVGAQVSAALAGLTAEQVAASVIAYEPIWAIGTGKSASQDDAQKMCKVVRDVVAADFGQEVADKVRVQYGGSVKPENVASYMACPDVDGALVGGASLEAESFLALLDFVK

SEQ ID NO: 285 - DNA, 780 bp, Streptococcus pneumoniae
ttgaaaaaagaggtatgtgaaatgtcacgtaaaccatttatcgctggtaactggaaaatgaacaaaaatccagaagaagctaaagcattcgttgaagcagttgcatcaaaacttccttcatcagatcttgttgaagcaggtatcgctgctccagctcttgatttgacaactgttcttgctgttgcaaaaggctcaaaccttaaagttgctgctcaaaactgctactttgaaaatgcaggtgctttcactggtgaaactagcccacaagttttgaaagaaatcggtactgactacgttgttatcggtcactcagaacgccgtgactacttccatgaaactgatgaagatatcaacaaaaaagcaaaagcaatctttgcgaacggtatgcttccaatcatctgttgtggtgaatcacttgaaacttacgaagctggtaaagctgctgaattcgtaggtgctcaagtatctgctgcattggctggactgactgctgaacaagttgctgcctcagttatcgcttatgagccaatctgggctatcggtactggtaaatcagcttcacaagacgatgcacaaaaaatgtgtaaagttgttcgtgacgttgtagctgctgactttggtcaagaagtcgcagacaaagttcgtgttcaatacggaggttctgttaaacctgaaaatgttgcttcatacatggcttgcccagacgttgacggtgcccttgtaggtggtgcgtcacttgaagctgaaagcttcttggctttgcttgactttgtaaaataa

SEQ ID NO: 286 - protein, 259 aa, Streptococcus pneumoniae; identical to SEQ ID NO: 284

SEQ ID NO: 287 - DNA, 36 bp, Streptococcus pneumoniae
gcggcggcccatatgaaaaaagaggtatgtgaaatg

SEQ ID NO: 288 - DNA, 32 bp, Streptococcus pneumoniae
gcgcggatccttttacaaagtcaagcaaagcc

SEQ ID NO: 289 - protein, 13 aa, Streptococcus pneumoniae
KMCKVVRDVVAAD

SEQ ID NO: 290 - protein, 10 aa, Streptococcus pneumoniae
MLPIICCGES

SEQ ID NO: 291 - protein, 10 aa, Streptococcus pneumoniae
EAESFLALLD

SEQ ID NO: 292 - DNA, 1287 bp, Pseudomonas aeruginosa
atgggtacccatgtgatcaagatgccggacatcggggaaggcatcgccgaggtcgaactggtggagtggcatgtccaggtcggcgactcggtcaatgaagaccaggtcctcgccgaggtgatgaccgacaaggccacggtggagattccctcgccggtggccggacgcatcctcgccctcggcggccagccgggccaggtgatggcggtgggcggcgaactgatccgcctggaggtggaaggcgccggcaacctcgccgagagtccggccgcggcgacgccggccgcgcccgtcgccgccaccccggagaaaccgaaggaagccccggtcgcggcgccgaaagccgccgccgaagcgccgcgcgccttgcgcgacagcgaggcgccacggcagcggcgccagcccggcgaacgcccgctggcctcccccgcggtgcgccagcgcgcccgcgacctgggcatcgagttgcagttcgtgcagggcagcggtcccgccggacgcgtcctccacgaggacctcgatgcctacctgacccaggatggcagcgtcgcgcgcagcggcggcgccgcgcaggggtatgccgagcgacacgacgaacaggcggtgccggtgatcggcctgcgtcgcaagatcgcccagaagatgcaggacgccaagcgacgcatcccgcatttcagctatgtcgaggaaatcgacgtcaccgatctggaagccctgcgcgcccatctcaaccagaaatggggtggccagcgcggcaagctgaccctgctgccgttcctggtccgcgccatggtcgtggcgctgcgcgacttcccgcagttgaacgcgcgctacgacgacgaggccgaggtggtcacccgctacggcgcggtgcacgtcggcatcgccacccagagcgacaacggcctgatggtgccggtgctgcgccacgccgaatcgcgcgacctctggggcaacgccagcgaagtggcgcgcctggccgaagccgcacgcagcggcaaggcgcaacgccaggagctgtccggctcgaccatcaccctgagcagcctcggcgtgctcggcgggatcgtcagcacaccggtgatcaaccatccggaggtggccatcgtcggcgtcaaccgcatcgtcgagcgaccgatggtggtcggcggcaacatcgtcgtgcgcaagatgatgaacctctcctcctccttcgaccaccgggtggtcgacgggatggacgcggcggccttcatccaggccgtgcgcggcctgctcgaacatcccgccaccctgttcctggagtaa

SEQ ID NO: 293 - protein, 428 aa, Pseudomonas aeruginosa
MGTHVIKMPDIGEGIAEVELVEWHVQVGDSVNEDQVLAEVMTDKATVEIPSPVAGRILALGGQPGQVMAVGGELIRLEVEGAGNLAESPAAATPAAPVAATPEKPKEAPVAAPKAAAEAPRALRDSEAPRQRRQPGERPLASPAVRQRARDLGIELQFVQGSGPAGRVLHEDLDAYLTQDGSVARSGGAAQGYAERHDEQAVPVIGLRRKIAQKMQDAKRRIPHFSYVEEIDVTDLEALRAHLNQKWGGQRGKLTLLPFLVRAMVVALRDFPQLNARYDDEAEVVTRYGAVHVGIATQSDNGLMVPVLRHAESRDLWGNASEVARLAEAARSGKAQRQELSGSTITLSSLGVLGGIVSTPVINHPEVAIVGVNRIVERPMVVGGNIVVRKMMNLSSSFDHRVVDGMDAAAFIQAVRGLLEHPATLFLE

SEQ ID NO: 294 - DNA, 1287 bp, Pseudomonas aeruginosa
atgggtacccatgtgatcaagatgccggacatcggggaaggcatcgccgaggtcgaactggtggagtggcatgtccaggtcggcgactcggtcaatgaagaccaggtcctcgccgaggtgatgaccgacaaggccacggtggagattccctcgccggtggccggacgcatcctcgccctcggcggccagccgggtcaggtgatggcggtgggcggcgaactgatccgcctggaggtggaaggtgccggcaacctcgccgagagtccggccgcggcgacgccggccgcgcccgtcgccgccaccccggagaaaccgaaggaagccccggtcgcggggccgaaagccgccgccgaagcgccgcgcgccttgcgcgacagcgaggcgccacggcagcggtgccagcctggcgaacgcccgctggcctcccccgcggtgcgccagcgcgcccgcgacctgggcatcgagttgcagttcgtgcagggcagcggtcccgccgaacgcgtcctccacgaggacctcgatgcctacctgacccaggatggcagcgtcgcgcgcaccggcggcgccgcgcaggggtatgccgagcgacacgacgaacaggcggtgccggtgatcggcctgcgtcgcaagatcgcccagaagatgcaggacgccaagcgacgcatcccgcatttcagctatgtcgaggaaatcaacgtcaccgatctggaagccctgcgcacccatctcaaccagaaatggggtggccagcgcggcaagctgaccgtgctaccgttcgtggtccgcgccatggtcgtggcgctgctcgacttcccgcagttgaacgcgcgctacgacgacgaggccgaggtggtcacccgctacggcgcggtgcacgtcggcatcgccacccagagcgacaacggcctgatggtgccggtgttgctccacgccgaatcgcgcgacctttggggcaacgccggcgaagtggcgcgcctggccgaagccgcacgcagcggcaaggcgcaacgccaggagctgtccggctcgaccatcaccctgagcaacctcggcgcgctcgtcgggatcgtcagcacaccggtgatcaaccatccggaggtggccataatcggcgtcagccgcatcgtcgagcgaccgatggtggtcgacggcaacatcgtcgtgcgcaagatgatgaacctctcctcctccttcgaccaccgggtggtcgacgggatggacgcggcggccttcatccaggccgtgcgcggcctgctcgaacatcccgccaccctgttcctggagtaa

SEQ ID NO: 295 - protein, 428 aa, Pseudomonas aeruginosa
MGTHVIKMPDIGEGIAEVELVEWHVQVGDSVNEDQVLAEVMTDKATVEIPSPVAGRILALGGQPGQVMAVGGELIRLEVEGAGNLAESPAAATPAAPVAATPEKPKEAPVAGPKAAAEAPRALRDSEAPRQRCQPGERPLASPAVRQRARDLGIELQFVQGSGPAERVLHEDLDAYLTQDGSVARTGGAAQGYAERHDEQAVPVIGLRRKIAQKMQDAKRRIPHFSYVEEINVTDLEALRTHLNQKWGGQRGKLTVLPFVVRAMVVALLDFPQLNARYDDEAEVVTRYGAVHVGIATQSDNGLMVPVLLHAESRDLWGNAGEVARLAEAARSGKAQRQELSGSTITLSNLGALVGIVSTPVINHPEVAIIGVSRIVERPMVVDGNIVVRKMMNLSSSFDHRVVDGMDAAAFIQAVRGLLEHPATLFLE

SEQ ID NO: 296 - DNA, 33 bp, Pseudomonas aeruginosa
gcggcggcccatatgggtacccatgtgatcaag

SEQ ID NO: 297 - DNA, 28 bp, Pseudomonas aeruginosa
gcgcggatccctccaggaacagggtggc

SEQ ID NO: 298 - protein, 19 aa, Pseudomonas aeruginosa
KLTLLPFLVRAMVVALRDF

SEQ ID NO: 299 - protein, 12 aa, Pseudomonas aeruginosa
EQAVPVIGLRRK

SEQ ID NO: 300 - protein, 9 aa, Pseudomonas aeruginosa
LMVPVLRHA

SEQ ID NO: 301 - DNA, 702 bp, Enterococcus faecalis
ttggacgcatatgagattattcagtatattggcgatgccaaaaagcaaacgcttgttaaagtaacactgaaagggcaattaaaagaagtcacgtttccagaaacaattaaggtctttaataattgtaaaactgggacattgtttggcgattgggctgacgtaaaaccttttttagaagcaaacaaagaaaaaattgaggattatgttgtagaaaacgatgcacgtaactcagcaattccttttcttgatctgaaagacattaatgctcggattgaaccaggtgctttgattcgcgaaaaagttgaaattggcgatcaagcggtgattatgatgggggctattctaaatattggcgccgtcgttggtgcagggactatgattgatatgggcgctgttttgggcggtcgtgcaactgtagggaagcattgtcatattggcgcaggaacggttttagctggtgtcattgaaccaccaagtgccgcacctgtggttattgaaaacgaggttgtcattggagcgaatgcggtcgtactagaaggggttcgtgttggtgaaggtgccgttgtggctgctggggcggtagttgtggaagacgttccagcgcataccgttgttgcaggcgtgccagcaaaagtaattaaacaaattgatgataaaaccaagagtaaaacagagattttagaagaattacgtaaactctga

SEQ ID NO: 302 - protein, 233 aa, Enterococcus faecalis
LDAYEIIQYIGDAKKQTLVKVTLKGQLKEVTFPETIKVFNNCKTGTLFGDWADVKPFLEANKEKIEDYVVENDARNSAIPFLDLKDINARIEPGALIREKVEIGDQAVIMMGAILNIGAVVGAGTMIDMGAVLGGRATVGKHCHIGAGTVLAGVIEPPSAAPVVIENEVVIGANAVVLEGVRVGEGAVVAAGAVVVEDVPAHTVVAGVPAKVIKQIDDKTKSKTEILEELRKL

SEQ ID NO: 303 - DNA, 702 bp, Enterococcus faecalis
ttggacgcatatgagattattcagtatattggcgatgccaaaaagcaaacgcttgttaaagtaacactgaaagggcaattaaaagaagtcacgtttccagaaacaattaaggtctttaataattgtaaaactgggacattgtttggcgattgggctgacgtaaaaccttttttagaagctaacaaagaaaaaattgaggattatgttgtagaaaacgatgcacgtaactcagcaattccttttcttgatctgaaagccattaatgctcggagcgaaccaggtgctttgattcgcgaaaaagttgaaattggcgatcaagcggtgattatgatgggggctattctaaatattggcgccgtcgttggtgcagggactatgattgatatgggcgctgttttgggcggtcgtgcaactgtagggaagcattgtcatattggcgcaggaacggttttagctggtgtcattgaaccaccaagtgccgcacctgtggttattgaaaacgaggttgtcattggagcgaatgcggtcgtactagaaggggttcgtgttggtgaaggtgccgttgtggctgctggggcggtagttgtggaagacgttccagcgcataccgttgttgcaggcgtgccagcaaaagtaattaaacaaattgatgataaaaccaagagtaaaacagagattttagaagaattacgtaaactctga

SEQ ID NO: 304 - protein, 233 aa, Enterococcus faecalis
LDAYEIIQYIGDAKKQTLVKVTLKGQLKEVTFPETIKVFNNCKTGTLFGDWADVKPFLEANKEKIEDYVVENDARNSAIPFLDLKAINARSEPGALIREKVEIGDQAVIMMGAILNIGAVVGAGTMIDMGAVLGGRATVGKHCHIGAGTVLAGVIEPPSAAPVVIENEVVIGANAVVLEGVRVGEGAVVAAGAVVVEDVPAHTVVAGVPAKVIKQIDDKTKSKTEILEELRKL

SEQ ID NO: 305 - DNA, 33 bp, Enterococcus faecalis
cgcggggtaccatggacgcatatgagattattc

SEQ ID NO: 306 - DNA, 34 bp, Enterococcus faecalis
gcgcggatcctttacgtaattcttctaaaatctc

SEQ ID NO: 307 - protein, 77 aa, Enterococcus faecalis
VGKHCHIGAGTVLAGVIEPPSAAPVVIENEVVIGANAVVLEGVRVGEGAVVAAGAVVVEDVPAHTVVAGVPAKVIKQ

SEQ ID NO: 308 - protein, 18 aa, Enterococcus faecalis
QTLVKVTLKGQLKEVTFP

SEQ ID NO: 309 - protein, 11 aa, Enterococcus faecalis
ILNIGAVVGAG

SEQ ID NO: 310 - DNA, 567 bp, Pseudomonas aeruginosa
atgaaaaccgctcaagagttccgcgccggccaggttgccaacatcaatggcgctccctgggtcatccagaaggccgagttcaacaagtccggccgtaacgctgccgtcgtcaagatgaagctgaagaacctgctgaccggcgccggtaccgagaccgtgttcaaggccgacgacaagctggagccgatcatcctcgatcgcaaggaagtgacctactcctacttcgccgacccgctgtacgtcttcatggacagcgagttcaaccagtacgagatcgagaaagacgatctggaaggcgtgctgaccttcatcgaagacggcatgaccgacatctgcgaagccgtgttctacaacgacaaggtgatctcggtagagctgccgaccaccatcgttcgccagatcgcctacaccgagccggccgtccgcggcgacacctcgggcaaggtgatgaagaccgcgcgcctgaacaacggcgccgagttgcaggtttccgcgttctgcgaaatcggcgactcgatcgagatcgatacccgcaccggcgagtacaagtcccgcgtcaaggcctga

SEQ ID NO: 311 - protein, 188 aa, Pseudomonas aeruginosa
MKTAQEFRAGQVANINGAPWVIQKAEFNKSGRNAAVVKMKLKNLLTGAGTETVFKADDKLEPIILDRKEVTYSYFADPLYVFMDSEFNQYEIEKDDLEGVLTFIEDGMTDICEAVFYNDKVISVELPTTIVRQIAYTEPAVRGDTSGKVMKTARLNNGAELQVSAFCEIGDSIEIDTRTGEYKSRVKA

SEQ ID NO: 312 - DNA, 567 bp, Pseudomonas aeruginosa
atgaaaaccgctcaagagttccgcgccggccaggttgccaacatcaatggcgctccctgggtcatccagaaggccgagttcaacaagtccggccgtaacgctgccgtcgtcaagatgaagctgaagaacctgctgaccggcgccggtaccgagaccgtgttcaaggccgacgacaagctggagccgatcatcctcgatcgcaaggaagtgacctactcctacttcgccgacccgctgtacgtcttcatggacagcgagttcaaccagtacgagatcgagaaagacgatctggaaggcgtgctgaccttcatcgaagacggcatgaccgacatctgcgaagccgtgttctacaacgacaaggtgatctcggtagagctaccgaccaccatcgttcgccagatcgcctacaccgagccggccgtccgcggcgacacctcgggcaaggtgatgaagaccgcgcgcctgaacaacggcgccgagttgcaggtttccgcgttctgcgaaatcggcgactcgatcgagatcgatacccgcaccggcgagtacaagtcccgcgtcaaggcctga

SEQ ID NO: 313 - protein, 188 aa, Pseudomonas aeruginosa; identical to SEQ ID NO: 311

SEQ ID NO: 314 - DNA, 33 bp, Pseudomonas aeruginosa
gcggcggcccatatgaaaaccgctcaagagttc

SEQ ID NO: 315 - DNA, 29 bp, Pseudomonas aeruginosa
gcgcggatccggccttgacgcgggacttg

SEQ ID NO: 316 - protein, 11 aa, Pseudomonas aeruginosa
ELQVSAFCEIG

SEQ ID NO: 317 - protein, 30 aa, Pseudomonas aeruginosa
ICEAVFYNDKVISVELPTTIVRQIAYTEPA

SEQ ID NO: 318 - protein, 15 aa, Pseudomonas aeruginosa
VTYSYFADPLYVFMD

SEQ ID NO: 319 - DNA, 870 bp, Enterococcus faecalis
atgccagtagtatcaggagcagaattcttaaaagcagcacgtaaaggcgggtatgcagtaggtggctataacacaaataacttagaatggacacaagcgattttagaagcagcagaagctaaaaaagcaccagttctaatccaaacatcaatgggcgctgctaaatacatgggcggctacaaagtagctaaagacatgattactaatttagtagactcaatgaatatcacagttccagtagcaattcacttagaccacggtgactacgaagctgctttagaatgtatcgaagttggctatacttcaatcatgtttgatggttctcacttaccattcgaagaaaacttaaaattagcgaaagatgtagttgaaaaagcgcacgctaaaggtatttctgtcgaatgtgaagttggttcaatcggtggtgaagaagacggaatcatcggtactggcgaattagctgatatcgaagaatgtaaacaaatggttgctacaggtattgactacttagcatgtggtatcggtaacatccatggtcaatatccagaaaactggaaaggtttagcatttgatcacttacaagcgattgctgaagctgtcggttctgatgtacctctagtattacacggaggttctggtattcctcaagaacaaattgaaaaagcaatttcaatgggtatctcaaaagttaacgtaaatacagaattccaattatcattcgctaaagcaacgcgcgaatatattgaagctggtaaagatttagaaggtaaaggatttgaccctcgtaaattattagcaccaggtaaagctgcaatcatcaaagatgcagaagaacacattgattggttcggttcagctaacaaagcttga

SEQ ID NO: 320 - protein, 289 aa, Enterococcus faecalis
MPVVSGAEFLKAARKGGYAVGGYNTNNLEWTQAILEAAEAKKAPVLIQTSMGAAKYMGGYKVAKDMITNLVDSMNITVPVAIHLDHGDYEAALECIEVGYTSIMFDGSHLPFEENLKLAKDVVEKAHAKGISVECEVGSIGGEEDGIIGTGELADIEECKQMVATGIDYLACGIGNIHGQYPENWKGLAFDHLQAIAEAVGSDVPLVLHGGSGIPQEQIEKAISMGISKVNVNTEFQLSFAKATREYIEAGKDLEGKGFDPRKLLAPGKAAIIKDAEEHIDWFGSANKA

SEQ ID NO: 321 - DNA, 870 bp, Enterococcus faecalis
atgccagtagtatcaggagcagaattcttaaaagcagcacgtaaaggcgggtatgcagtaggtggctataacacaaataacttagaatggacacaagcgattttagaagcagcagaagctaaaaaagcaccagttctaatccaaacatcaatgggcgctgctaaatacatgggcggctacaaagtagctaaagacatgattactaatttagtagactcaatgaatatcacagttccagtagcaattcacttagaccacggtgactacgaagctgctttagaatgtatcgaagttggctatacttcaatcatgtttgatggttctcacttaccattcgaagaaaacttaaaattagcgaaagatgtagttgaaaaagcgcacgctaaaggtatttctgtcgaatgtgaagttggttcaatcggtggtgaagaagacggaatcattggtactggcgaattagctgatatcgaagaatgtaaacaaatggttgctacaggtattgactacttagcatgtggtatcggtaacatccatggtcaatatccagaaaactggaaaggtttagcatttgatcacttacaagcgattgctgaagctgtcggttctgatgtacctctagtattacacggaggttctggtattcctcaagaacaaattgaaaaagcaatttcaatgggtatctcaaaagttaacgtaaatacagaattccaattatcattcgctaaagcaacgcgcgaatatattgaagctggtaaagatttagaaggtaaaggatttgaccctcgtaaattattagcaccaggtaaagctgcaatcatcaaagatgcagaagaacacattgattggttcggttcagctaacaaagcttga

SEQ ID NO: 322 - protein, 289 aa, Enterococcus faecalis; identical to SEQ ID NO: 320

SEQ ID NO: 323 - DNA, 32 bp, Enterococcus faecalis
gcggcggcccatatgccagtagtatcaggagc

SEQ ID NO: 324 - DNA, 30 bp, Enterococcus faecalis
gcgcggatcctttgttagctgaaccgaacc

SEQ ID NO: 325 - protein, 11 aa, Enterococcus faecalis
ITVPVAIHLDH

SEQ ID NO: 326 - protein, 23 aa, Enterococcus faecalis
AFDHLQAIAEAVGSDVPLVLHGG

SEQ ID NO: 327 - protein, 13 aa, Enterococcus faecalis
AKGISVECEVGSI

SEQ ID NO: 328 - DNA, 1044 bp, Enterococcus faecalis
atgaatcgaaaagatgaacatctatcattagctaaagcgttccacaaagaaaaaagtaatgactttgatcgtgtgcgttttgttcaccaatcgtttgctgaatccgctgttaacgaagtggatatttccacttcgtttctttcttttcagcttccccaacctttttatgtcaatgcaatgacaggtggtagtcagcgtgcaaaagaaattaatcagcaattaggcattattgccaaagaaactggccttttagttgcgacaggatctgtctcggcagcgttaaaagatgctagtttagcggatacgtatcaaattatgcgaaaagaaaacccagatggactcatttttgccaatattggtgcaggcttgggtgtggaagaagcaaagcgagcgcttgatttatttcaagcgaatgccttacaaatccatgtaaatgtgccccaagaattggtcatgcctgaaggagatcgtgatttcactaattggctaaccaagattgaagctatcgtacaggccgtagaagtgcctgtcattgtcaaagaggttggctttggcatgagccaagaaaccttagaaaaacttacctctatcggcgttcaagcagcggatgtgagcggccaaggcggaacgagttttacacaaattgaaaatgcccggcggaagaaacgagaactttctttcttagatgattgggggcaatcaacggtcatctctcttctggaatcacaaaattggcaaaagaaactaactattctcggctctggcggtgtgcgtaactctcttgatattgtcaaaggactcgctttaggtgccaaaagcatgggagttgctgggactatcttagcttcccttatgagtaaaaatggtttagaaaataccttagcccttgtacagcaatggcaagaagaagtgaaaatgctttatactcttttaggaaaaaagacgacagaagaattgacgagtaccgcacttgtcctcgatccagttttagttaattggtgtcataaccgtggtatcgacagcactgttttcgcaaaacgttga

SEQ ID NO: 329 - protein, 347 aa, Enterococcus faecalis
MNRKDEHLSLAKAFHKEKSNDFDRVRFVHQSFAESAVNEVDISTSFLSFQLPQPFYVNAMTGGSQRAKEINQQLGIIAKETGLLVATGSVSAALKDASLADTYQIMRKENPDGLIFANIGAGLGVEEAKRALDLFQANALQIHVNVPQELVMPEGDRDFTNWLTKIEAIVQAVEVPVIVKEVGFGMSQETLEKLTSIGVQAADVSGQGGTSFTQIENARRKKRELSFLDDWGQSTVISLLESQNWQKKLTILGSGGVRNSLDIVKGLALGAKSMGVAGTILASLMSKNGLENTLALVQQWQEEVKMLYTLLGKKTTEELTSTALVLDPVLVNWCHNRGIDSTVFAKR

SEQ ID NO: 330 - DNA, 1043 bp, Enterococcus faecalis
atgaatcgaaaagatgaacatctatcattagctaaagcgttccacaaagaaaaaagtaatgactttgatcgtgtgcgttttgttcaccaatcgtttgctgaatccgctgttaacgaagtggatatttccacttcgtttctttcttttcagcttccccaacctttttatgtcaatgcaatgacaggtggtagtcagcgtgcaaaagaaattaatcagcaattaggcattattgccaaagaaactggccttttagttgcgacaggatctgtctcggcagcgttaaaagatgctagtttagcggatacgtatcaaattatgcgaaaagaaaacccagatggactcctttttgccaatattggtgcaggcttgggtgtggaagaagcaaagcgagcgcttgatttatttcaagcgaatgccttacaaatccatgtaaatgtgccccaagaattggtcatgcctgaaggagatcgtgatttcactaattggctaaccaagattgaagctatcgtacaggccgtagaagtgcctgtcattgtcaaagaggttggctttggcatgagccaagaaaccttagaaaaacttacctctatcggcgttcaagcagcggatgtgagcggccaaggcggaacgagttttacacaaattgaaaatgcccggcggaagaaacgagaactttctttcttagatgattgggggcaatcaacggtcatctctcttctggaatcacaaaattggcaaaagaaactaactattctcggctctggcggtgtgcgtaactctcgtgatattgccaaaggactctttttaggtacctaaagcatgtgagtagctgggactatattacgttcccttaggagtaagaatggtttagaaaataccttagccctggtgcagcaatggcaagaagaagtgaaaatgctttatgctcttttaggaaaaaagacgacagaagaattgacgagtgccgcacttgtcctcgatccagttttagttaattggtgtcataaccgtggtatcgacagcactgttttcgcaaaacgtaa

SEQ ID NO: 331 - protein, 345 aa, Enterococcus faecalis
MNRKDEHLSLAKAFHKEKSNDFDRVRFVHQSFAESAVNEVDISTSFLSFQLPQPFYVNAMTGGSQRAKEINQQLGIIAKETGLLVATGSVSAALKDASLADTYQIMRKENPDGLLFANIGAGLGVEEAKRALDLFQANALQIHVNVPQELVMPEGDRDFTNWLTKIEAIVQAVEVPVIVKEVGFGMSQETLEKLTSIGVQAADVSGQGGTSFTQIENARRKKRELSFLDDWGQSTVISLLESQNWQKKLTILGSGGVRNSRDIAKGLFLGTSMVAGTILRSLRSKNGLENTLALVQQWQEEVKMLYALLGKKTTEELTSAALVLDPVLVNWCHNRGIDSTVFAKR

SEQ ID NO: 332 - DNA, 34 bp, Enterococcus faecalis
gcggcggcccatatgaatcgaaaagatgaacatc

SEQ ID NO: 333 - DNA, 31 bp, Enterococcus faecalis
gcgcggatccttttgcgaaaacagtgctgtc

SEQ ID NO: 334 - protein, 18 aa, Enterococcus faecalis
KIEAIVQAVEVPVIVKEV

SEQ ID NO: 335 - protein, 14 aa, Enterococcus faecalis
STALVLDPVLVNWC

SEQ ID NO: 336 - protein, 23 aa, Enterococcus faecalis
ALDLFQANALQIHVNVPQELVMP

SEQ ID NO: 337 - DNA, 1347 bp, Enterococcus faecalis
atggacgcaaaacaatatgttaaaaatattcaagaaaaaattcaccaattagaccaaggtcaaacagaatatttacaagcagtcgatgagtttttaccaaccgtagaaggttttttagaaaaaaatcctcaatacattgaagcaaatgttttaggtgtcttgattgaacctgaacgtatttttcaatttcgtgtgccgtggcaagatgaccagggcaattggcatgtgaacagaggctatcgtgtccaatataattcagcgattggaccatacaaaggtggtttgcggtttcatccaagtgtgaatttaagtgtgatgaagtttttggcctttgaacaaatttttaaaaatagtttaactggtttgccaatcggtggcggcaaaggcggtagtgattttgatccaaaaggtaagtcagatgctgaagtgatgcgcttttgtcaaagtttcatgaccgaacttcaaaaacatattggtccaagcacagatgttccagcaggcgatattggcgtaggcgctcgtgaaattggttatttgtttggcatgtataaacgcttgcgcaactatgatgcaggagtgttgactggcaaacctttaggatactggggaagccaagcaagaacagaagcgacgggttatggaacggtttattttgttaaacatttattagcagataaaaacgatacgtttgaaggcaaaaaagtcgctgtttctggtagtgggaatgtcgcaatttatgccatggaaaaagcaactgagctaggcgccacagtaatcacatgttccgattcgtctggttttgtctatgatccagaaggaattgatgtggcgttagtaaaagaactaaaagaaaaaaatcgtgagcgcatttcaaaatatgttgaaacacgtaaaggcgcaacttattatgataaagaatctgtttggaatttcgaaacagcgtatgacattgcgttaccatgtgcaacacaaaatgaaatcaacgaaaagcaagccgctattttagtgaaaaacggagtgaaagtcgtggcagaaggcgcaaatatgccttgtacactagaagcagtcgccgtttttgctaaatcagctgtaatttattgtccaggcaaagccgctaatgcaggtggtgttgcggtttctgcattagagatgagccaaaatgctgaacgtttagcttggtcctttgaaaaagttgacggtatgctagatcaaattatgcaaaacatttatgagacttgtcgtgatacagctaacgaatatcaggcacgagataactttgttttaggtgcgaatattgctggctttgaaaaagtagcggcagcgatgctaagtcaaggactcgtttga

SEQ ID NO: 338 - protein, 448 aa, Enterococcus faecalis
MDAKQYVKNIQEKIHQLDQGQTEYLQAVDEFLPTVEGFLEKNPQYIEANVLGVLIEPERIFQFRVPWQDDQGNWHVNRGYRVQYNSAIGPYKGGLRFHPSVNLSVMKFLAFEQIFKNSLTGLPIGGGKGGSDFDPKGKSDAEVMRFCQSFMTELQKHIGPSTDVPAGDIGVGAREIGYLFGMYKRLRNYDAGVLTGKPLGYWGSQARTEATGYGTVYFVKHLLADKNDTFEGKKVAVSGSGNVAIYAMEKATELGATVITCSDSSGFVYDPEGIDVALVKELKEKNRERISKYVETRKGATYYDKESVWNFETAYDIALPCATQNEINEKQAAILVKNGVKVVAEGANMPCTLEAVAVFAKSAVIYCPGKAANAGGVAVSALEMSQNAERLAWSFEKVDGMLDQIMQNIYETCRDTANEYQARDNFVLGANIAGFEKVAAAMLSQGLV

SEQ ID NO: 339 - DNA, 1347 bp, Enterococcus faecalis
atggacgcaaaacaatatgttaaaaatattcaagaaaaaattcaccaattagaccaaggtcaaacagaatatttacaagcagtcgatgagtttttaccaaccgtagaaggttttttagaaaaaaatcctcaatacattgaagcaaatgttttaggtgtcttgattgaacctgaacgtatttttcaatttcgtgtgccgtggcaagatgaccagggcaattggcatgtgaacagaggctatcgtgtccaatataattcagcgattggaccatacaaaggtggtttgcggtttcatccaagtgtgaatttaagtgtgatgaagtttttggcctttgaacaaatttttaaaaatagtttaactggtttgccaatcggtggcggcaaaggcggtagtgattttgatccaaaaggtaagtcagatgctgaagtgatgcgcttttgtcaaagtttcatgaccgaacttcaaaaacatattggtccaagcacagatgttccagcaggcgatattggcgtaggcgctcgtgaaattggttatttgtttggcatgtataaacgcttgcgcaactatgatgcaggagtgttgactggcaaacctttaggatactggggaagccaagcaagaacagaagcgacgggttatggaacggtttattttgttaaacatttattagcagataaaaacgatacgtttgaaggcaaaaaagtcgctgtttctggtagtgggaatgtcgcaatttatgccatggaaaaagcaactgagctaggcgccacagtaatcacatgttccgattcgtctggttttgtctatgatccagaaggaattgatgtggcgttagtaaaagaactaaaagaaaaaaatcgtgagcgcatttcaaaatatgttgaaacacgtaaaggcgcaacttattatgataaagaatctgtttggaatttcgaaacagcgtatgacattgcgttaccatgtgcaacacaaaatgaaatcaacgaaaagcaagccgctattttagtgaaaaacggagtgaaagtcgtggcagaaggcgcaaatatgccttgtacactagaagcagtctccgtgttggttaaatcaggtgtgagttattgtccaggcaaagccgctaatgcagatggtgttgcggtttctgcattagcgatgagccgaaaaggtgagcgtttagcttggtcctttgaaaaagttgacggtatgctagatcaaattatgcaaaacatttatgagacttgtcgtgatacagctaacgaatatcaggcacgagataactttgttttaggtgcgaatattgctggctttgaaaaagtagcggcagcgatgctaagtcaaggactcgtttga

SEQ ID NO: 340 - protein, 448 aa, Enterococcus faecalis
MDAKQYVKNIQEKIHQLDQGQTEYLQAVDEFLPTVEGFLEKNPQYIEANVLGVLIEPERIFQFRVPWQDDQGNWHVNRGYRVQYNSAIGPYKGGLRFHPSVNLSVMKFLAFEQIFKNSLTGLPIGGGKGGSDFDPKGKSDAEVMRFCQSFMTELQKHIGPSTDVPAGDIGVGAREIGYLFGMYKRLRNYDAGVLTGKPLGYWGSQARTEATGYGTVYFVKHLLADKNDTFEGKKVAVSGSGNVAIYAMEKATELGATVITCSDSSGFVYDPEGIDVALVKELKEKNRERISKYVETRKGATYYDKESVWNFETAYDIALPCATQNEINEKQAAILVKNGVKVVAEGANMPCTLEAVSVLVKSGVSYCPGKAANADGVAVSALAMSRKGERLAWSFEKVDGMLDQIMQNIYETCRDTANEYQARDNFVLGANIAGFEKVAAAMLSQGLV

SEQ ID NO: 341 - DNA, 43 bp, Enterococcus faecalis
gcggcggcccatatggacgcaaaacaatatgttaaaaatattc

SEQ ID NO: 342 - DNA, 30 bp, Enterococcus faecalis
gcgcggatccgagtccttgacttagcatcg

SEQ ID NO: 343 - protein, 13 aa, Enterococcus faecalis
YGTVYFVKHLLAD

SEQ ID NO: 344 - protein, 21 aa, Enterococcus faecalis
PCTLEAVAVFAKSAVIYCPGK

SEQ ID NO: 345 - protein, 14 aa, Enterococcus faecalis
YIEANVLGVLIEPE

SEQ ID NO: 346 - DNA, 1623 bp, Streptococcus pneumoniae
atgtcaaaagaaattaaattttcatcagatgcccgttcagccatggttcgtggtgtcgatatccttgcagacactgttaaagtaaccttgggaccaaaaggtcgcaatgtcgttcttgaaaagtcattcggttcacccttgattaccaatgacggtgtgaccattgccaaagaaatcgaattggaagaccattttgaaaatatgggtgctaagttagtatcagaagtagcttctaaaaccaatgatatcgcaggtgacggaactacgactgcaacagtcttgacccaagctatcgtccgtgaaggaatcaaaaacgtcacagcaggtgcaaatccaatcggtattcgtcgtgggattgaaacagcagttgccgcagcagttgaagctttgaaaaacaacgccatccctgttgccaataaagaagctatcgctcaagttgcagccgtatcttctcgttctgaaaaagttggtgagtacatctctgaagcaatggaaaaagttggcaaagacggtgtcatcaccatcgaagagtcacgtggtatggaaacagagcttgaagtcgtagaaggaatgcagtttgaccgtggttacctttcacagtacatggtgacagatagcgaaaaaatggtggctgaccttgaaaatccgtacattttgattacagacaagaaaatttccaatatccaagaaatcttgccacttttggaaagcattctccaaagcaatcgtccactcttgattattgcggatgatgtggatggcgaggctcttccaactcttgttttgaacaagattcgtggaaccttcaacgtagtagcagtcaaggcacctggttttggtgaccgtcgcaaagccatgcttgaagatatcgccatcttaacaggcggaacagttatcacagaagaccttggtcttgagttgaaagatgcgacaattgaagctcttggtcaagcagcgagagtgaccgtggacaaagatagcacggttattgtagaaggtgcaggaaatcctgaagcgatttctcaccgtgttgcggttatcaagtctcaaatcgaaactacaacttctgaatttgaccgtgaaaaattgcaagaacgcttggccaaattgtcaggtggtgtagcggttattaaggttggagccgcaactgaaactgagttgaaagaaatgaaactccgcattgaagatgccctcaacgctactcgtgcagctgttgaagaaggtattgttgcaggtggtggaacagctcttgccaatgtgattccagctgttgctaccttggaattgacaggagatgaagcaacaggacgtaatattgttctccgtgctttggaagaacccgttcgtcaaattgctcacaatgcaggatttgaaggatctatcgttatcgatcgtttgaaaaatgctgagcttggtataggatttaacgcagcaactggcgagtgggttaacatgattgatcaaggtatcattgatccagttaaagtgagtcgttcagccctacaaaatgcagcatctgtagccagcttgattttgacaacagaagcagtcgtagccaataaaccagaaccagtagccccagctccagcaatggatccaagcatgatgggcgggatgatgtaa

SEQ ID NO: 347 - protein, 540 aa, Streptococcus pneumoniae
MSKEIKFSSDARSAMVRGVDILADTVKVTLGPKGRNVVLEKSFGSPLITNDGVTIAKEIELEDHFENMGAKLVSEVASKTNDIAGDGTTTATVLTQAIVREGIKNVTAGANPIGIRRGIETAVAAAVEALKNNAIPVANKEAIAQVAAVSSRSEKVGEYISEAMEKVGKDGVITIEESRGMETELEVVEGMQFDRGYLSQYMVTDSEKMVADLENPYILITDKKISNIQEILPLLESILQSNRPLLIIADDVDGEALPTLVLNKIRGTFNVVAVKAPGFGDRRKAMLEDIAILTGGTVITEDLGLELKDATIEALGQAARVTVDKDSTVIVEGAGNPEAISHRVAVIKSQIETTTSEFDREKLQERLAKLSGGVAVIKVGAATETELKEMKLRIEDALNATRAAVEEGIVAGGGTALANVIPAVATLELTGDEATGRNIVLRALEEPVRQIAHNAGFEGSIVIDRLKNAELGIGFNAATGEWVNMIDQGIIDPVKVSRSALQNAASVASLILTTEAVVANKPEPVAPAPAMDPSMMGGMM

SEQ ID NO: 348 - DNA, 1623 bp, Streptococcus pneumoniae
atgtcaaaagaaattaaattttcatcagatgcccgttcagccatggttcgtggtgtcgatatccttgcagatactgttaaagtaactttgggaccaaaaggtcgcaatgtcgttcttgaaaagtcattcggttcacccttgattaccaatgacggtgtgactattgccaaagaaattgaattagaagaccattttgaaaatatgggtgccaaattggtatcagaagtagcttcaaaaaccaatgatatcgcaggtgatggaactacaactgcaactgttttgacccaagcaatcgtccgtgaaggaatcaaaaacgtcacagcaggtgcaaatccaatcggtattcgtcgtgggattgaaacagcagttgccgcagcagttgaagctttgaaaaacaacgtcatccctgttgccaataaagaagctatcgctcaagttgcagccgtatcttctcgttctgaaaaagttggtgagtacatctctgaagcaatggaaaaagttggcaaagacggtgtcatcaccatcgaagagtcacgtggtatggaaacagagcttgaagtcgtagaaggaatgcagtttgaccgtggttacctttcacagtacatggtgacagatagcgaaaaaatggtggctgaccttgaaaatccgtacattttgattacagacaagaaaatttccaatatccaagaaatcttgccacttttggaaagcattctccaaagcaatcgtccactcttgattattgcggatgatgtggatggcgaggctcttccaactcttgttttgaacaagattcgtggaaccttcaacgtagtagcagtcaaggcacctggttttggtgaccgtcgcaaagccatgcttgaagatatcgccatcttaacaggcggaacagttatcacagaagaccttggtcttgagttgaaagatgcgacaattgaagctcttggtcaagcagcgagagtgaccgtggacaaagatagcacggttattgtagaaggtgcaggaaatcctgaagcgatttctcaccgtgttgcggttatcaagtctcaaatcgaaactacaacttctgaatttgaccgtgaaaaattgcaagaacgcttggccaaattgtcaggtggtgtagcggttattaaggtcggagccgcaactgaaactgagttgaaagaaatgaaactccgcattgaagatgccctcaacgctactcgtgcagctgttgaagaaggtattgttgcaggtggtggaacagctcttgccaatgtgattccagctgttgctaccttggaattgacaggagatgaagcaacaggacgtaatattgttctccgtgctttggaagaacctgttcgtcaaattgctcacaatgcaggatttgaaggatctatcgttatcgatcgtttgaaaaatgctgagcttggtataggattcaacgcagcaactggcgagtgggttaacatgattgatcaaggtatcattgatccagttaaagtgagtcgttcagccctacaaaatgcagcatctgtagccagcttgattttgacaacagaagcagtcgtagccaataaaccagaaccagtagccccagctccagcaatggatccaagcatgatgggcgggatgatgtaa

SEQ ID NO: 349 - protein, 540 aa, Streptococcus pneumoniae
MSKEIKFSSDARSAMVRGVDILADTVKVTLGPKGRNVVLEKSFGSPLITNDGVTIAKEIELEDHFENMGAKLVSEVASKTNDIAGDGTTTATVLTQAIVREGIKNVTAGANPIGIRRGIETAVAAAVEALKNNVIPVANKEAIAQVAAVSSRSEKVGEYISEAMEKVGKDGVITIEESRGMETELEVVEGMQFDRGYLSQYMVTDSEKMVADLENPYILITDKKISNIQEILPLLESILQSNRPLLIIADDVDGEALPTLVLNKIRGTFNVVAVKAPGFGDRRKAMLEDIAILTGGTVITEDLGLELKDATIEALGQAARVTVDKDSTVIVEGAGNPEAISHRVAVIKSQIETTTSEFDREKLQERLAKLSGGVAVIKVGAATETELKEMKLRIEDALNATRAAVEEGIVAGGGTALANVIPAVATLELTGDEATGRNIVLRALEEPVRQIAHNAGFEGSIVIDRLKNAELGIGFNAATGEWVNMIDQGIIDPVKVSRSALQNAASVASLILTTEAVVANKPEPVAPAPAMDPSMMGGMM

SEQ ID NO: 350 - DNA, 38 bp, Streptococcus pneumoniae
gcggcggcccatatgtcaaaagaaattaaattttcatc

SEQ ID NO: 351 - DNA, 29 bp, Streptococcus pneumoniae
gcgcagatctcatcatcccgcccatcatg

SEQ ID NO: 352 - protein, 10 aa, Streptococcus pneumoniae
TFNVVAVKAP

SEQ ID NO: 353 - protein, 8 aa, Streptococcus pneumoniae
LPTLVLNK

SEQ ID NO: 354 - protein, 19 aa, Streptococcus pneumoniae
QERLAKLSGGVAVIKVGAA

SEQ ID NO: 355 - DNA, 783 bp, Staphylococcus aureus
atgttaattcaattagatcaaattgggcgaatgaagcaaggaaaaacaattttaaaaaagatttcttggcaaattgctaaaggtgataaatggatattatatgggttgaatggtgctggcaagacaacacttctaaatattttaaatgcgtatgagcctgcaacatctggaactgttaaccttttcggtaaaatgccaggcaaggtagggtattctgcagagactgtacgacaacatataggttttgtatctcatagtttactggaaaagtttcaagagggtgaaagagtaatcgatgtggtgataagcggtgcctttaaatcaattggtgtttatcaagatattgatgatgagatacgtaatgaagcacatcaattacttaaattagttggaatgtctgctaaagcgcaacaatatattggttatttatctaccggtgaaaaacaacgagtgatgattgcacgagctttaatggggcaaccccaggttttaattttagatgagccagcagctggtttagactttattgcacgagaatcgttgttaagtatacttgactcattgtcagattcatatccaacgcttgcgatgatttatgtgacgcactttattgaagaaataactgctaacttttccaaaattttactgctaaaagatggccaaagtattcaacaaggcgctgtagaagacatattaacttctgaaaacatgtcacgatttttccagaaaaatgtagcagttcaaagatggaataatcgattttctatggcaatgttagagtaa

SEQ ID NO: 356 - protein, 260 aa, Staphylococcus aureus
MLIQLDQIGRMKQGKTILKKISWQIAKGDKWILYGLNGAGKTTLLNILNAYEPATSGTVNLFGKMPGKVGYSAETVRQHIGFVSHSLLEKFQEGERVIDVVISGAFKSIGVYQDIDDEIRNEAHQLLKLVGMSAKAQQYIGYLSTGEKQRVMIARALMGQPQVLILDEPAAGLDFIARESLLSILDSLSDSYPTLAMIYVTHFIEEITANFSKILLLKDGQSIQQGAVEDILTSENMSRFFQKNVAVQRWNNRFSMAMLE

SEQ ID NO: 357 - DNA, 783 bp, Staphylococcus aureus
atgttaattcaattagatcaaattgggcgaatgaagcaaggaaaaacaattttaaaaaagatttcttggcaaattgctaaaggtgataaatggatattatatgggttgaatggtgttggcaagacaacacttctaaatattttaaatgcgtatgagcctgcaacatctggaactgttaaccttttcggtaaaatgccaggcaaggtagggtattctgcagagactgtacgacaacatataggttttgtatctcatagtttactggaaaagtttcaagagggtgaaagagtaatcgatgtggtgataagcggtgcctttaaatcaattggtgtttatcaagatattgatgatgagatacgtaatgaagcacatcaattacttaaattagttggaatgtctgctaaagcgcaacaatatattggttatttatctaccggtgaaaaacaacgagtgatgattgcacgagctttaatggggcaaccccaggttttaattttagatgagccagcagctggtttagactttattgcacgagaatcgttgttaagtatacttgactcattgtcagattcatatccaacgcttgcgatgatttatgtgacgcactttattgaagaaataactgctaacttttccaaaattttactgctaaaagatggccaaagtattcaacaaggcgctgtagaagacatattaacttctgaaaacatgtcacgatttttccagaaaaatgtagcagttcaaagatggaataatcgattttctatggcaatgttagagtaa

SEQ ID NO: 358 - protein, 260 aa, Staphylococcus aureus
MLIQLDQIGRMKQGKTILKKISWQIAKGDKWILYGLNGVGKTTLLNILNAYEPATSGTVNLFGKMPGKVGYSAETVRQHIGFVSHSLLEKFQEGERVIDVVISGAFKSIGVYQDIDDEIRNEAHQLLKLVGMSAKAQQYIGYLSTGEKQRVMIARALMGQPQVLILDEPAAGLDFIARESLLSILDSLSDSYPTLAMIYVTHFIEEITANFSKILLLKDGQSIQQGAVEDILTSENMSRFFQKNVAVQRWNNRFSMAMLE

SEQ ID NO: 359 - DNA, 37 bp, Staphylococcus aureus
gcggcggcccatatgttaattcaattagatcaaattg

SEQ ID NO: 360 - DNA, 33 bp, Staphylococcus aureus
gcgcggatccctctaacattgccatagaaaatc

SEQ ID NO: 361 - protein, 10 aa, Staphylococcus aureus
VIDVVISGAF

SEQ ID NO: 362 - protein, 10 aa, Staphylococcus aureus
HQLLKLVGMS

SEQ ID NO: 363 - protein, 18 aa, Staphylococcus aureus
GQPQVLILDEPAAGLDFI

SEQ ID NO: 364 - DNA, 2265 bp, Pseudomonas aeruginosa
atgagcgaatccctcgatctgagcctggaaggggtcgaacgccggtcgttggccgagttcaccgagcaggcctatctgaactattccatgtacgtgatcatggaccgcgccctgccgcatatcggcgacggcctgaaaccggtgcagcgacgcatcgtctacgccatgagcgaactggggctggatgccgattccaagcacaagaagtcggcgcgcaccgtcggcgacgtgctcggcaagttccacccgcacggcgactcggcctgctacgaggccatggtgctgatggcgcagccgttctcctatcgctatccgctggtggacggccagggcaactggggggctccggacgatcccaagtccttcgccgccatgcgttataccgaggcgcgcctgtcgcgctattccgaggtgctgctcagcgaactgggccagggtaccgtggactgggtaccgaacttcgacggcaccctcgacgagccggccgtgctgccggcccgcctgcccaacctgctgctcaacggcaccaccggcatcgcggtgggcatggccaccgacgtgccgccgcacaacctgcgggaagtcgcgtcggcctgcgtgcgcctgctcgaccagccgggcgcgacggtcgccgaattgtgcgaacacgtgccgggcccggacttccccaccgaagccgagatcatcaccccgcgcgccgacctgcagaaggtctacgagaccggccgcggttcggtgcgcatgcgcgcggtgtaccgcgtcgaggacggcgatatcgtcatccacgccctgccgcaccaggtgtccggttccaaggtgctggaacagatcgccgggcagatgcaggccaagaagctgccgatggtggccgacctgcgcgacgagtcggaccacgagaacccgacccgcatcgtcatcatcccgcgttcgaaccgggtcgatgtcgaagagctgatgacccatctgttcgccaccaccgacctggagaccagctaccgggtcaacctgaacatcatcggcctcgacggcaagccgcaggtcaaggacctgcgccagttgctctcggagtggctgcagttccgcatcggcaccgtgcgtcgacgcctgcagttccgcctggacaaggtcgagcgccgcctgcatctgctggatggcttgctgatcgccttcctcaacctcgacgaggtgatccacatcatccgcaccgaggaccagcccaaggcggtgctgatggagcgcttcgaactcagcgaggtgcaggccgactacatcctcgacacccgcctgcgccagttggcacgcctggaagagatgaagatccgcggcgagcaggaagagttgctgaaggagcagaagcgcctgcagaccctgctcggcagcgaggccaagctgaagaagctggtgcgcgaggagctgatcaaggacgccgagacctacggcgacgaccgccgttcgccgatcgtcgcccgcgccgaggcccgcgcgctgtcggaaaccgagctgatgcccaccgaaccggtgaccgtggtgctctcggaaaaaggctgggtgcgttgcgccaagggccacgacatcgacgccgccggcctctcctacaaggccggcgacggcttcaaggccgccgcgccgggacgctcgaaccagtatgcggtgttcatcgactccaccgggcgcagctactcgctgccggcccacagcctgccgtccgcgcgaggccagggcgagccactcagcggccggctgacgccgccgccgggggccagcttcgaatgcgtgctgctgccggacgacgatgcgctgttcgtgatcgcttccgacgccggctatggtttcgtggtcaagggcgaggacctgcaggccaagaacaaggccggcaaggccctgctcagcctgcccaacggctccgccgtggtggcgccgcgcccggtgcgcgatgtggagcaggattggctggcggccgtgacgaccgagggccgtctgctattgttcaaggtctccgacctgccgcagctcggcaagggcaagggcaacaagatcatcggcatccccggcgaacgcgtggccagccgcgaggaatacctcaccgacctggctgttctgccagccggggcgacgttggtcctgcaggccggaaagcgtaccctgtcgctcaagggcgacgacctggaacactacaagggggagcgaggccggcgaggcaacaagctgccgcgcggtttccagcgcgtcgacagcctgctggtggatattccgccacaggattga

SEQ ID NO: 365 - protein, 754 aa, Pseudomonas aeruginosa
MSESLDLSLEGVERRSLAEFTEQAYLNYSMYVIMDRALPHIGDGLKPVQRRIVYAMSELGLDADSKHKKSARTVGDVLGKFHPHGDSACYEAMVLMAQPFSYRYPLVDGQGNWGAPDDPKSFAAMRYTEARLSRYSEVLLSELGQGTVDWVPNFDGTLDEPAVLPARLPNLLLNGTTGIAVGMATDVPPHNLREVASACVRLLDQPGATVAELCEHVPGPDFPTEAEIITPRADLQKVYETGRGSVRMRAVYRVEDGDIVIHALPHQVSGSKVLEQIAGQMQAKKLPMVADLRDESDHENPTRIVIIPRSNRVDVEELMTHLFATTDLETSYRVNLNIIGLDGKPQVKDLRQLLSEWLQFRIGTVRRRLQFRLDKVERRLHLLDGLLIAFLNLDEVIHIIRTEDQPKAVLMERFELSEVQADYILDTRLRQLARLEEMKIRGEQEELLKEQKRLQTLLGSEAKLKKLVREELIKDAETYGDDRRSPIVARAEARALSETELMPTEPVTVVLSEKGWVRCAKGHDIDAAGLSYKAGDGFKAAAPGRSNQYAVFIDSTGRSYSLPAHSLPSARGQGEPLSGRLTPPPGASFECVLLPDDDALFVIASDAGYGFVVKGEDLQAKNKAGKALLSLPNGSAVVAPRPVRDVEQDWLAAVTTEGRLLLFKVSDLPQLGKGKGNKIIGIPGERVASREEYLTDLAVLPAGATLVLQAGKRTLSLKGDDLEHYKGERGRRGNKLPRGFQRVDSLLVDIPPQD

SEQ ID NO: 366 - DNA, 2265 bp, Pseudomonas aeruginosa
atgagcgaatccctcgatctgagcctggaaggggtcgaacgccggtcgttggccgagttcaccgagcaggcctatctgaactattccatgtacgtgatcatggaccgcgccctgccgcatatcggcgacggcctgaaaccggtgcagcgacgcatcgtctacgccatgagcgaactggggctggatgccgattccaagcacaagaagtcggcgcgcaccgtcggcgacgtgctcggcaagttccacccgcacggcgactcggcctgctacgaggccatggtgctgatggcgcagccgttctcctatcgctatccgctggtggacggccagggcaactggggggcgccggacgatcccaagtccttcgccgccatgcgttataccgaggcgcgcctgtcgcgtatttccgaggtgctgctcagcgaactgggccagggtaccgtggactgggtaccgaacttcgacggcaccctcgacgagccggccgtgctgccggcccgcctgcccaacctgctgctcaacggcaccaccggcatcgcggtgggcatggccaccgacgtgccgccgcacaacctgcgggaagtcgcgtcggcctgcgtgcgcctgctcgaccagccgggcgcgacggtcgccgaattgtgcgaacacgtgccgggcccggacttccccaccgaagccgagatcatcaccccgcgcgccgacctgcagaaggtctacgagaccggccgcggttcggtgcgcatgcgcgcggtgtaccgcgtcgaggacggcgatatcgtcatccacgccctgccgcaccaggtgtccggttccaaggtgctggaacagatcgccgggcagatgcaggccaagaagctgccgatggtggccgacctgcgcgacgagtcggaccacgagaacccgacccgcatcgtcatcatcccgcgttcgaaccgggtcgatgtcgaagagctgatgacccatctgttcgccaccaccgacctggagaccagctaccgggtcaacctgaacatcatcggcctcgacggcaagccgcaggtcaaggacctgcgccagttgctctcggagtggctgcagttccgcatcggcaccgtgcgtcgacgcctgcagttccgcctggacaaggtcgagcgccgcctgcatctgctggatggcttgctgatcgccttcctcaacctcgacgaggtgatccacatcatccgcaccgaggaccagcccaaggcggtgctgatggagcgcttcgaactcagcgaggtgcaggccgactacatcctcgacacccgcctgcgccagttggcacgcctggaagagatgaagatccgcggcgagcaggaagagttgctgaaggagcagaagcgcctgcagaccctgctcggcagcgaggccaagctgaagaagctggtgcgcgaggagctgatcaaggacgccgagacctacggcgacgaccgccgttcgccgatcgtcgcccgcgccgaggcccgcgcgctgtcggaaaccgagctgatgcccaccgaaccggtgaccgtggtgctctcggaaaaaggctgggtgcgttgcgccaagggccacgacatcgacgccgccggcctctcctacaaggccggcgacggcttcaaggccgccgcgccgggacgctcgaaccagtatgcggtgttcatcgactccaccgggcgcagctactcgctgccggcccacagcctgccgtccgcgcgaggccagggcgagccactcagcggccggctgacgccgccgccgggggccagcttcgaatgcgtgctgctgccggacgacgatgcgctgttcgtgatcgcttccgacgccggctatggtttcgtggtcaagggcgaggacctgcaggccaagaacaaggccggcaaggccctgttcagcctgcccaacggctccgccgtggtggcgccgcgcccggtgcgcgatgtggagcaggattggctggcggccgtgacgaccgagggccgtctgctattgttcaaggtctccgacctgccgcagctcggcaagggcaagggcaacaagatcatcggcatccccggcgaacgcgtggccagccgcgaggaatacctcaccgacctcgctgttctgccagccggggcgacgttggtcctgcaggccggaaagcgtaccctgtcgctcaagggcgacgacctggaccactacaagggggagcgaggccggcgaggcaacaagctgccgcgcggtttccagcgcgtcgacagcctgctggtggatattccgccacaggattga

SEQ ID NO: 367 - protein, 754 aa, Pseudomonas aeruginosa
MSESLDLSLEGVERRSLAEFTEQAYLNYSMYVIMDRALPHIGDGLKPVQRRIVYAMSELGLDADSKHKKSARTVGDVLGKFHPHGDSACYEAMVLMAQPFSYRYPLVDGQGNWGAPDDPKSFAAMRYTEARLSRISEVLLSELGQGTVDWVPNFDGTLDEPAVLPARLPNLLLNGTTGIAVGMATDVPPHNLREVASACVRLLDQPGATVAELCEHVPGPDFPTEAEIITPRADLQKVYETGRGSVRMRAVYRVEDGDIVIHALPHQVSGSKVLEQIAGQMQAKKLPMVADLRDESDHENPTRIVIIPRSNRVDVEELMTHLFATTDLETSYRVNLNIIGLDGKPQVKDLRQLLSEWLQFRIGTVRRRLQFRLDKVERRLHLLDGLLIAFLNLDEVIHIIRTEDQPKAVLMERFELSEVQADYILDTRLRQLARLEEMKIRGEQEELLKEQKRLQTLLGSEAKLKKLVREELIKDAETYGDDRRSPIVARAEARALSETELMPTEPVTVVLSEKGWVRCAKGHDIDAAGLSYKAGDGFKAAAPGRSNQYAVFIDSTGRSYSLPAHSLPSARGQGEPLSGRLTPPPGASFECVLLPDDDALFVIASDAGYGFVVKGEDLQAKNKAGKALFSLPNGSAVVAPRPVRDVEQDWLAAVTTEGRLLLFKVSDLPQLGKGKGNKIIGIPGERVASREEYLTDLAVLPAGATLVLQAGKRTLSLKGDDLDHYKGERGRRGNKLPRGFQRVDSLLVDIPPQD

SEQ ID NO: 368 - DNA, 31 bp, Pseudomonas aeruginosa
gcggcggcccatatgagcgaatccctcgatc

SEQ ID NO: 369 - DNA, 29 bp, Pseudomonas aeruginosa
gcgcggatccatcctgtggcggaatatcc

SEQ ID NO: 370 - protein, 11 aa, Pseudomonas aeruginosa
TEPVTVVLSEK

SEQ ID NO: 371 - protein, 29 aa, Pseudomonas aeruginosa
SGRLTPPPGASFECVLLPDDDALFVIASD

SEQ ID NO: 372 - protein, 29 aa, Pseudomonas aeruginosa
LREVASACVRLLDQPGATVAELCEHVPGP

SEQ ID NO: 373 - DNA, 1236 bp, Streptococcus pneumoniae
atggattttagcagaaaggataatcagtcaatggaatatcgaaaaatacaagaagcattagaagcattgcagaagggacgacttgttcttgttatagacgacaaggatagagaaaatgaaggagacttaatttgttctgcacaagcagctacaacagaaaatgttaattttatggctacttatgccaaaggattaatttgtatgcctatgagcgaaagtttagctaatcaattaatgctttcacctatggttgaaaacaatacagataatcataagactgcttttacagtttcaattgattataaagaaacgaccacaggtatttctgccgaggaaagaggactgaccgcacgtatgtgtgtagctgaagatataacaccctctgattttcgcaggccaggacacatgtttcctttaattgcaaaaaaaggtggtgtcctagaaagaaatggacacacagaagcaactgttgatttattaaaattagctggactaaaagagtgtggcctatgttgtgaaataatgaatcatgatggcaaaatgatgagaacagatgatttaattcagttctcgaaaaaacacaacattccactaattaccatcaaagaattacaagaatatagaaaagtatatgatcagctggtagaacgagtttcaactgtcaatatgcctactagatacggtaatttcaaagcaattagctatatagataaactaaatggggaacatcatcttgctcttattatgggaaatatagaggatgaagccaatgtattatgtcgggtccactccgaatgtttaacaggagatgttttaggctctttacgttgcgattgtggacagcaattcgataaggctatgaaaatgattgttgagaatggttcgggtgtcttactttacttgcgacaggagggacgaggaattggacttatcaataaattaaaagcctatcatttacaagatcaaggcatggatacgcttgatgccaatcttgcattaggctttgaaggtgatttaagagaatatcatattggagcaaaaatgcttaaagatctgggacttcagtcacttcatttactgacaaataatcctgacaaggttgaacagttagaaaaatatggaattaccatttccagtagaatatcaatcgaaatagaagccaatccttacgatagtttttatttagaaacaaagaaaaatcgaatgggtcacattttaaatatggaggaaaaataa

SEQ ID NO: 374 - protein, 411 aa, Streptococcus pneumoniae
MDFSRKDNQSMEYRKIQEALEALQKGRLVLVIDDKDRENEGDLICSAQAATTENVNFMATYAKGLICMPMSESLANQLMLSPMVENNTDNHKTAFTVSIDYKETTTGISAEERGLTARMCVAEDITPSDFRRPGHMFPLIAKKGGVLERNGHTEATVDLLKLAGLKECGLCCEIMNHDGKMMRTDDLIQFSKKHNIPLITIKELQEYRKVYDQLVERVSTVNMPTRYGNFKAISYIDKLNGEHHLALIMGNIEDEANVLCRVHSECLTGDVLGSLRCDCGQQFDKAMKMIVENGSGVLLYLRQEGRGIGLINKLKAYHLQDQGMDTLDANLALGFEGDLREYHIGAKMLKDLGLQSLHLLTNNPDKVEQLEKYGITISSRISIEIEANPYDSFYLETKKNRMGHILNMEEK

SEQ ID NO: 375 - DNA, 1236 bp, Streptococcus pneumoniae
atggattttagcagaaaggataatcagtcaatggaatatcgaaaaatacaagaagcattagaagcattgcagaagggacgacttgttcttgttatagacgacaaggatagagaaaatgaaggagacttaatttgttctgcacaagcagctacaacagaaaatgttaattttatgtctacttatgccaaaggattaatttgtatgcctatgagcgaaagtttagctaatcaattaatgctttcacctatggttgaaaacaatacagataatcataagactgcttttacagtttcaattgattataaagaaacgaccacaggtatttctgccgaggaaagaggactgaccgcacgtatgtgtgtagctgaagatataacaccctctgattttcgcaggccaggacacatgttttctttaattgcaaaaaaaggtggtgtcctagaaagaaatggacacacagaagcaactgttgatttattaaaattagctggactaaaagagtgtggcctatgttgtgaaataatgaatcatgatggcaaaatgatgagaacagatgatttaattcagttctcgaaaaaacacaacattccactaattaccatcaaagaattacaagaatatagaaaagtatatgatcagctggtagaacgagtttcaactgtcaatatgcctactagatacggtaatttcaaagcaattagctatatagataaactaaatggggaacatcatcttgctcttattatgggaaatatagaggatgaagccaatgtattatgtcgggtccactccgaatgtttaacaggagatgttttaggctctttacgttgcgattgtggacagcaattcgataaggctatgaaaatgattgttgagaatggttcgggtgtcttactttacttgcgacaggagggacgaggaattggacttatcaatgaattaaaagcctatcatttacaagatcaaggcatggatacgcttgatgccaatcttgcagtagactttttacatgagttaagagaatatcgtatgagagcacaaaggcttaaaggtttgataatgcagtcacttcaaaggctgacaaataatcctgacaaggttgaacagttagaaaaatatggaattaccatttccagtagaatatcaatcgaaatagaagccaatccttacgatagtttttatttagaaacaaagaaaaatcgaatgggtcacattttaaatatggaggaaaaataa

SEQ ID NO: 376 - protein, 411 aa, Streptococcus pneumoniae
MDFSRKDNQSMEYRKIQEALEALQKGRLVLVIDDKDRENEGDLICSAQAATTENVNFMSTYAKGLICMPMSESLANQLMLSPMVENNTDNHKTAFTVSIDYKETTTGISAEERGLTARMCVAEDITPSDFRRPGHMFSLIAKKGGVLERNGHTEATVDLLKLAGLKECGLCCEIMNHDGKMMRTDDLIQFSKKHNIPLITIKELQEYRKVYDQLVERVSTVNMPTRYGNFKAISYIDKLNGEHHLALIMGNIEDEANVLCRVHSECLTGDVLGSLRCDCGQQFDKAMKMIVENGSGVLLYLRQEGRGIGLINELKAYHLQDQGMDTLDANLAVDFLHELREYRMRAQRLKGLIMQSLQRLTNNPDKVEQLEKYGITISSRISIEIEANPYDSFYLETKKNRMGHILNMEEK

SEQ ID NO: 377 - DNA, 37 bp, Streptococcus pneumoniae
gcggcggcccatatggattttagcagaaaggataatc

SEQ ID NO: 378 - DNA, 34 bp, Streptococcus pneumoniae
gcgcggatcctttttcctccatatttaaaatgtg

SEQ ID NO: 379 - protein, 27 aa, Streptococcus pneumoniae
ANVLCRVHSECLTGDVLGSLRCDCGQQ

SEQ ID NO: 380 - protein, 21 aa, Streptococcus pneumoniae
EATVDLLKLAGLKECGLCCEI

SEQ ID NO: 381 - protein, 9 aa, Streptococcus pneumoniae
GSGVLLYLR

SEQ ID NO: 382 - DNA, 1068 bp, Enterococcus faecalis
atgggaaaagaatatcatgttgccgtggtaggagcaacaggtgctgtcgggacaagaatgattgaattgttagcagaaacaagtttgccaattgccagtgtgaggttattggcgtctaagcgttctgctggacaagagattcagtttaaagggcaacctcttatcgtggaagaattagtcccggaatcatttgaaggaatcgatttagcattatttagtgctggtgggagtatttccgaaaagtttgcaccagaagcagttaagcgcggagctgtcgttgttgacaacactagccattttagaatggcaaaagatgttcctttagttgttccggaagtgaacccggaagccttgaaaaatcatcagggaatcatcgcaaatcccaattgttctacgattcaaatgatggtggccttagaaccaattcggcaagcgtttggcttagaacgaatcatcgtttcaacgtatcaagctgtgagtggcgcaggtatccgtgcaattaatgagctaaaagaacaagccgaagattttttagagggaaaacctgtcagcgaatggtcagctgaaattttaccagctggcagtgacgaaaaacattatccaattgcttttaatgcgttgcctcaaattgatgttttttcagaagcagggtatacctacgaagaatggaaaatgatgaatgaaacaaaaaaaatcatgggagacaacaagctaaaagtcgttgccacctgtgtccgtattccggtaatttcaggacattctgaatctgtttatatagaagtgaaacaagcagatgcatcggtctcagccatccaagaattaatggcgcaagctccaggtgtaattttgcaagatgagccaagtgaacaactatatccacaagcgctaaatagcgtcaaccagaaagaaacatttgtcggccgtattcgtcaagacgttgacgtgaagaacggtttccatttatggattgtgtcagacaacctattaaaaggagctgcttggaactcggtccaaattgctgaaacgctacacgaaatgaatttgcttcgtgtacctgaaaacgactga

SEQ ID NO: 383 - protein, 355 aa, Enterococcus faecalis
MGKEYHVAVVGATGAVGTRMIELLAETSLPIASVRLLASKRSAGQEIQFKGQPLIVEELVPESFEGIDLALFSAGGSISEKFAPEAVKRGAVVVDNTSHFRMAKDVPLVVPEVNPEALKNHQGIIANPNCSTIQMMVALEPIRQAFGLERIIVSTYQAVSGAGIRAINELKEQAEDFLEGKPVSEWSAEILPAGSDEKHYPIAFNALPQIDVFSEAGYTYEEWKMMNETKKIMGDNKLKVVATCVRIPVISGHSESVYIEVKQADASVSAIQELMAQAPGVILQDEPSEQLYPQALNSVNQKETFVGRIRQDVDVKNGFHLWIVSDNLLKGAAWNSVQIAETLHEMNLLRVPEND

SEQ ID NO: 384 - DNA, 1068 bp, Enterococcus faecalis
atgggaaaagaatatcatgttgccgtggtaggagcaacaggtgctgtcgggacaagaatgattgaattgttagcagaaacaagtttgccaattgccagtgtgaggttattggcgtctaagcgttctgctggacaagagattcagtttaaagggcaacctcttatcgtggaagaattagtcccggaatcatttgaaggaatcgatttagcattatttagggctggtgggagtatttccgaaaagtttgcaccagaagcagttaagcgcggagctgtcgttgttgacaacactagccattttagaatggcaaaagatgttcctttagttgttccggaagtgaacccggaagccttgaaaaatcatcagggaatcatcgcaaatcccaattgttctacgattcaaatgatggtggccttagaaccaattcggcaagcgtttggcttagaacgaatcatcgtttcaacgtatcaagctgtgagtggcgcaggtatccgtgcaattaatgagctaaaagaacaagccgaagattttttagagggaaaacctgtcagcgaatggtcagctgaaattttaccagctggcagtgacgaaaaacattatccaattgcttttaatgcgttgcctcaaattgatgttttttcagaagcagggtatacctacgaagaatggaaaatgatgaatgaaacaaaaaaaatcatgggagacaacaagctaaaagtcgttgccacctgtgtccgtattccggtaatttcaggacattctgaatctgtttatatagaagtgaaacaagcagatgcatcggtctcagccatccaagaattaatggcgcaagctccaggtgtaattttgcaagatgagccaagtgaacaactatatccacaagcgctaaatagcgtcaaccagaaagaaacatttgtcggccgtattcgtcaagacgttgacgtgaagaacggtttccatttatggattgtgtcagacaacctattaaaaggagctgcttggaactcggtccaaattgctgaaacgctacacgaaatgaatttgcttcgtgtacctgaaaacgactaa

SEQ ID NO: 385 - protein, 355 aa, Enterococcus faecalis
MGKEYHVAVVGATGAVGTRMIELLAETSLPIASVRLLASKRSAGQEIQFKGQPLIVEELVPESFEGIDLALFRAGGSISEKFAPEAVKRGAVVVDNTSHFRMAKDVPLVVPEVNPEALKNHQGIIANPNCSTIQMMVALEPIRQAFGLERIIVSTYQAVSGAGIRAINELKEQAEDFLEGKPVSEWSAEILPAGSDEKHYPIAFNALPQIDVFSEAGYTYEEWKMMNETKKIMGDNKLKVVATCVRIPVISGHSESVYIEVKQADASVSAIQELMAQAPGVILQDEPSEQLYPQALNSVNQKETFVGRIRQDVDVKNGFHLWIVSDNLLKGAAWNSVQIAETLHEMNLLRVPEND

SEQ ID NO: 386 - DNA, 34 bp, Enterococcus faecalis
gcggcggcccatatgggaaaagaatatcatgttg

SEQ ID NO: 387 - DNA, 35 bp, Enterococcus faecalis
gcgcggatccgttttcaggtacacgaagcaaattc

SEQ ID NO: 388 - protein, 49 aa, Enterococcus faecalis
KLKVVATCVRIPVISGHSESVYIEVKQADASVSAIQELMAQAPGVILQD

SEQ ID NO: 389 - protein, 14 aa, Enterococcus faecalis
AKDVPLVVPEVNPE

SEQ ID NO: 390 - protein, 12 aa, Enterococcus faecalis
EYHVAVVGATGA

SEQ ID NO: 391 - DNA, 564 bp, Helicobacter pylori
atggcaattgggatgagcgagctcaaaaagggcttgaaaattgaattgggcggtgtgccttataggattgtagaataccagcatgtcaagcccggcaagggtgcggcttttgtgcgcgcgaaaatcaagtcgtttttagatggcaaggtgattgagaagactttccatgcgggggataagtgcgaagagcctaatctggttgaaaaaacgatgcaatacctttatcacgatggcgacacataccaatttatggacatagagagctatgagcaaatcgctttgaacgactctcaagtgggtgaggcttctaaatggatgctagatggcatgcaagtgcaggttttattgcataatgacaaggcgatttcagtggatgtgccgcaagttgtggctttaaagattgtagaaacagcccctaattttaagggcgatacttcaagtgcgagcaaaaaaccagcgactttagaaaccggtgcggtcgtgcaagtgcctttccatgttttagagggtgagatcattaaagtcaatacggaaacagaagagtatcttgaaaaggtgaagtga

SEQ ID NO: 392 - protein, 187 aa, Helicobacter pylori
MAIGMSELKKGLKIELGGVPYRIVEYQHVKPGKGAAFVRAKIKSFLDGKVIEKTFHAGDKCEEPNLVEKTMQYLYHDGDTYQFMDIESYEQIALNDSQVGEASKWMLDGMQVQVLLHNDKAISVDVPQVVALKIVETAPNFKGDTSSASKKPATLETGAVVQVPFHVLEGEIIKVNTETEEYLEKVK

SEQ ID NO: 393 - DNA, 564 bp, Helicobacter pylori; identical to SEQ ID NO: 391

SEQ ID NO: 394 - protein, 187 aa, Helicobacter pylori; identical to SEQ ID NO: 392

SEQ ID NO: 395 - DNA, 31 bp, Helicobacter pylori
gcggcggcccatatggcaattgggatgagcg

SEQ ID NO: 396 - DNA, 31 bp, Helicobacter pylori
gcgcggatcccttcaccttttcaagatactc

SEQ ID NO: 397 - protein, 18 aa, Helicobacter pylori
AISVDVPQVVALKIVETA

SEQ ID NO: 398 - protein, 19 aa, Helicobacter pylori
TGAVVQVPFHVLEGEIIKV

SEQ ID NO: 399 - protein, 11 aa, Helicobacter pylori
GMQVQVLLHND

SEQ ID NO: 400 - DNA, 285 bp, Staphylococcus aureus
atgctaaaaccaattggaaatcgtgtgattattgagaaaaaagaacaagaacaaacaactaaaagtggtattgttttaactgatagtgctaaagaaaaatcaaacgaaggcgttatcgttgcagtaggaactggacgcctattaaatgatggtacaagagtgactcctgaagtgaaagaaggggaccgtgtcgtgttccaacaatatgctggtacagaagttaaacgagataatgaaacatatctggtattaaatgaagaagatattttagcagttattgaataa

SEQ ID NO: 401 - protein, 94 aa, Staphylococcus aureus
MLKPIGNRVIIEKKEQEQTTKSGIVLTDSAKEKSNEGVIVAVGTGRLLNDGTRVTPEVKEGDRVVFQQYAGTEVKRDNETYLVLNEEDILAVIE

SEQ ID NO: 402 - DNA, 285 bp, Staphylococcus aureus; identical to SEQ ID NO: 400

SEQ ID NO: 403 - protein, 94 aa, Staphylococcus aureus; identical to SEQ ID NO: 401

SEQ ID NO: 404 - DNA, 34 bp, Staphylococcus aureus
gcggcggcccatatgctaaaaccaattggaaatc

SEQ ID NO: 405 - DNA, 34 bp, Staphylococcus aureus
gcgcggatccttcaataactgctaaaatatcttc

SEQ ID NO: 406 - protein, 9 aa, Staphylococcus aureus
GVIVAVGTG

SEQ ID NO: 407 - protein, 9 aa, Staphylococcus aureus
GDRVVFQQY

SEQ ID NO: 408 - protein, 7 aa, Staphylococcus aureus
SGIVLTD

SEQ ID NO: 409 - DNA, 294 bp, Pseudomonas aeruginosa
atgaagcttcgtcctctgcatgatcgcgtcgttatccgtcgcagcgaggaagagaccaagaccgcaggcggcatcgtgctgccgggttccgccgccgagaagccgaaccgcggtgaagtggtagccgtaggtaccggtcgtgtactggacaacggcgaagtgcgcgctctggcagtgaaggtgggcgacaaggtggtcttcgggccttactccggcagcaacgccatcaaggtcgatggcgaggaactgctggtgatgggcgagtccgaaatcctcgccgtcctggaagactga

SEQ ID NO: 410 - protein, 97 aa, Pseudomonas aeruginosa
MKLRPLHDRVVIRRSEEETKTAGGIVLPGSAAEKPNRGEVVAVGTGRVLDNGEVRALAVKVGDKVVFGPYSGSNAIKVDGEELLVMGESEILAVLED

SEQ ID NO: 411 - DNA, 294 bp, Pseudomonas aeruginosa; identical to SEQ ID NO: 409

SEQ ID NO: 412 - protein, 97 aa, Pseudomonas aeruginosa; identical to SEQ ID NO: 410

SEQ ID NO: 413 - DNA, 31 bp, Pseudomonas aeruginosa
gcggcggcccatatgaagcttcgtcctctgc

SEQ ID NO: 414 - DNA, 28 bp, Pseudomonas aeruginosa
gcgcggatccgtcttccaggacggcgag

SEQ ID NO: 415 - protein, 10 aa, Pseudomonas aeruginosa
RPLHDRVVIR

SEQ ID NO: 416 - protein, 17 aa, Pseudomonas aeruginosa
VRALAVKVGDKVVFGPY

SEQ ID NO: 417 - protein, 10 aa, Pseudomonas aeruginosa
GEVVAVGTGR

SEQ ID NO: 418 - DNA, 357 bp, Helicobacter pylori
atgaagtttcagccattaggagaaagggtcttagtagaaagacttgaagaagagaacaaaaccagttcaggcatcatcatccctgataacgctaaggaaaagcctttaatgggcgtagtcaaagcggttagccataaaatcagtgagggttgcaaatgcgttaaagaaggcgatgtgatcgcttttggcaaatacaaaggcgcagaaatcgttttagacggcactgaatacatggtgctagaactagaagacattctaggcattgtgggctcaggctcttgttgtcatacaggtaatcatgaccataaacatgctaaagagcatgaagcttgctgtcatgatcacaaaaaacactaa

SEQ ID NO: 419 - protein, 118 aa, Helicobacter pylori
MKFQPLGERVLVERLEEENKTSSGIIIPDNAKEKPLMGVVKAVSHKISEGCKCVKEGDVIAFGKYKGAEIVLDGTEYMVLELEDILGIVGSGSCCHTGNHDHKHAKEHEACCHDHKKH

SEQ ID NO: 420 - DNA, 357 bp, Helicobacter pylori
atgaagtttcagccattaggagaaagggtcttagtagaaagacttgaagaagagaacaaaaccagttcaggcatcatcatccctgataacgctaaagaaaagcctttaatgggcgtagtcaaagccgttagccataaaatcagtgagggttgcaaatgcgttaaagaaggcgatgtgatcgcttttggcaaatacaaaggcgcagaaatcgttttagacggcaccgaatacatggtgctagagctagaagacattctaggcattgtgggtgcgggatcttgctgtcatacaggtaatcatgatcataagcatgctaaagagcatgaagcttgctgtcatgatcacaaaaaacactaa

SEQ ID NO: 421 - protein, 118 aa, Helicobacter pylori
MKFQPLGERVLVERLEEENKTSSGIIIPDNAKEKPLMGVVKAVSHKISEGCKCVKEGDVIAFGKYKGAEIVLDGTEYMVLELEDILGIVGAGSCCHTGNHDHKHAKEHEACCHDHKKH

SEQ ID NO: 422 - DNA, 34 bp, Helicobacter pylori
gcggcggcccatatgaagtttcagccattaggag

SEQ ID NO: 423 - DNA, 32 bp, Helicobacter pylori
gcgcggatccgtgttttttgtgatcatgacag

SEQ ID NO: 424 - protein, 11 aa, Helicobacter pylori
LMGVVKAVSHK

SEQ ID NO: 425 - protein, 22 aa, Helicobacter pylori
YMVLELEDILGIVGSGSCCHTG

SEQ ID NO: 426 - protein, 8 aa, Helicobacter pylori
HEACCHDH

SEQ ID NO: 427 - DNA, 546 bp, Eschericia coli
atgtctgaagctcctaaaaagcgctggtacgtcgttcaggcgttttccggttttgaaggccgcgtagcaacgtcgctgcgtgagcatatcaaattacacaacatggaagatttgtttggtgaagtcatggtaccaaccgaagaagtggttgaaatccgtggcggtcagcgtcgcaaaagcgaacgtaaattcttccctggctacgtcctcgttcagatggtgatgaacgacgcgagctggcacctggtgcgcagcgtaccgcgtgtgatgggcttcatcggcggtacttccgatcgtcctgcgccaatcagcgataaagaagtcgatgcgattatgaaccgcctgcagcaggttggtgataagccgcgtccgaaaacgctgtttgaaccgggtgaaatggtccgtgttaatgatggtccgttcgctgacttcaacggtgttgttgaagaagtggattacgagaaatctcgtctgaaagtgtctgtttctatcttcggtcgtgcgaccccggtagagctggacttcagccaggttgaaaaagcctaa

SEQ ID NO: 428 - protein, 181 aa, Eschericia coli
MSEAPKKRWYVVQAFSGFEGRVATSLREHIKLHNMEDLFGEVMVPTEEVVEIRGGQRRKSERKFFPGYVLVQMVMNDASWHLVRSVPRVMGFIGGTSDRPAPISDKEVDAIMNRLQQVGDKPRPKTLFEPGEMVRVNDGPFADFNGVVEEVDYEKSRLKVSVSIFGRATPVELDFSQVEKA

SEQ ID NO: 429 - DNA, 546 bp, Eschericia coli; identical to SEQ ID NO: 427

SEQ ID NO: 430 - protein, 181 aa, Eschericia coli; identical to SEQ ID NO: 428

SEQ ID NO: 431 - DNA, 33 bp, Eschericia coli
gcggcggcccatatgtctgaagctcctaaaaag

SEQ ID NO: 432 - DNA, 29 bp, Eschericia coli
gcgcggatccggctttttcaacctggctg

SEQ ID NO: 433 - protein, 10 aa, Eschericia coli
FPGYVLVQMV

SEQ ID NO: 434 - protein, 10 aa, Eschericia coli
SRLKVSVSIF

SEQ ID NO: 435 - protein, 8 aa, Eschericia coli
RWYVVQAF

SEQ ID NO: 436 - DNA, 627 bp, Staphylococcus aureus
atgacaaataaagacgaatcagttaaaaaaaacactgaatcaacagttgaagaaacaaacgtcaaacaaaatattgatgattcagttgaacaagctgaagaaagtaaaggtcatttacaagatgaagcaatagaagaaacgtctgacgagaatgttattgaagaaatagatccaaaagatcaaaaaattaatgaacttcaacaattagcagatgaaaacgaagagaaatatttaaggctctacgctgagtttgaaaattataagcgtagaattcaaaaagaaaatgaaataaacaaaacatatcaagcacaacgtgtgttaacagatattttaccagcaatagacaatatagaacgtgcacttcaaattgaaggtgatgatgagacttttaaatctcttcaaaaaggtgtacaaatggtgcatgaaagtttgattaacgcactaaaagataatggtcttgaagttattaaaactgaaggtgaagcatttgatccaaatattcaccaagctgtagttcaagatgataaccctgattttgaatctggcgaaatcactcaagaactacaaaaaggatacaagcttaaagatagagtattaagaccatcaatggtcaaagtaaaccaataa

SEQ ID NO: 437 - protein, 208 aa, Staphylococcus aureus
MTNKDESVKKNTESTVEETNVKQNIDDSVEQAEESKGHLQDEAIEETSDENVIEEIDPKDQKINELQQLADENEEKYLRLYAEFENYKRRIQKENEINKTYQAQRVLTDILPAIDNIERALQIEGDDETFKSLQKGVQMVHESLINALKDNGLEVIKTEGEAFDPNIHQAVVQDDNPDFESGEITQELQKGYKLKDRVLRPSMVKVNQ

SEQ ID NO: 438 - DNA, 627 bp, Staphylococcus aureus
atgacaaataaagacgaatcagttgaaaaaaacactgaatcaacagttgaagaaacaaacgtcaaacaaaatattgatgattcagttgaacaagctgaagaaagtaaaggtcatttacaagatgaagcaatagaagaaacgtctgacgagaatgttattgaagaaatagatccaaaagatcaaaaaattaatgaacttcaacaattagcagatgaaaacgaagagaaatatttaaggctctacgctgagtttgaaaattataagcgtagaattcaaaaagaaaatgaaataaacaaaacatatcaagcacaacgtgtgttaacagatattttaccagcaatagacaatatagaacgtgcacttcaaattgaaggtgatgatgagacttttaaatctcttcaaaaaggtgtacaaatggtgcatgaaagtttgattaacgcactaaaagataatggtcttgaagttattaaaactgaaggtgaagcatttgatccaaatattcaccaagctgtagttcaagatgataaccctgattttgaatctggcgaaatcactcaagaactacaaaaaggatacaagcttaaagatagagtattaagaccatcaatggtcaaagtaaaccaataa

SEQ ID NO: 439 - protein, 208 aa, Staphylococcus aureus
MTNKDESVEKNTESTVEETNVKQNIDDSVEQAEESKGHLQDEAIEETSDENVIEEIDPKDQKINELQQLADENEEKYLRLYAEFENYKRRIQKENEINKTYQAQRVLTDILPAIDNIERALQIEGDDETFKSLQKGVQMVHESLINALKDNGLEVIKTEGEAFDPNIHQAVVQDDNPDFESGEITQELQKGYKLKDRVLRPSMVKVNQ

SEQ ID NO: 440 - DNA, 34 bp, Staphylococcus aureus
gcggcggcccatatgacaaataaagacgaatcag

SEQ ID NO: 441 - DNA, 33 bp, Staphylococcus aureus
gcgcggatccttggtttactttgaccattgatg

SEQ ID NO: 442 - protein, 10 aa, Staphylococcus aureus
PNIHQAVVQD

SEQ ID NO: 443 - protein, 12 aa, Staphylococcus aureus
AQRVLTDILPAI

SEQ ID NO: 444 - protein, 11 aa, Staphylococcus aureus
KDRVLRPSMVK

SEQ ID NO: 445 - DNA, 531 bp, Helicobacter pylori
atgatggattggtatgccatacaaacttattcagggagcgagcagtccgttaagaaagcgattgagaatctagcgaacgaccataatataagagataggatacaagagatcattgtgcctactgaagatattatagaggtttctaaaaaaagcaagacgaaagtaacggaacgaagcctttatcctgggtatgtttttattaaggtggatttagatacggttttgtggcataagatacaatctttgccaagagtgagtcgttttattggagaaaacaaaaagccaaccccattgagtgaagcggatattgggcatattttagaaaaaatgaataaccgagcagcccccaagcccaaaatcttttttgagcaaggcgaagtggtgcgcgtggtggaaggcccttttgcaaactttaccgctacggtggaagagtatgatgtggaacatcgcaagctcaagctcaatgtttctatttttggtaggaacactccaatagagattttgcattcgcaagtggaaaaaattatataa

SEQ ID NO: 446 - protein, 176 aa, Helicobacter pylori
MMDWYAIQTYSGSEQSVKKAIENLANDHNIRDRIQEIIVPTEDIIEVSKKSKTKVTERSLYPGYVFIKVDLDTVLWHKIQSLPRVSRFIGENKKPTPLSEADIGHILEKMNNRAAPKPKIFFEQGEVVRVVEGPFANFTATVEEYDVEHRKLKLNVSIFGRNTPIEILHSQVEKII

SEQ ID NO: 447 - DNA, 531 bp, Helicobacter pylori
atgatggattggtatgccatacaaacttattcagggagcgagcagtccgttaagaaagcgattgagaatctagcgaacgatcataatataagagataggatacaagagatcattgtgcctactgaagatattatagaggtttctaaaaaaagcaagacgaaagtaacggaacaaagcctttatcctgggtatgtttttattaaggtggatttagatacggttttgtggcataagatacaatctttgccaagagtgagccgttttattggagaaaataaaaagccaaccccattgagtgaagcggatattgggcatattttagaaaaaatgaataaccgagcggcccccaagcccaaaatcttttttgagcaaggcgaagtggtgcgcgtggtggaaggtccttttgcgaactttactgctacggtggaagagtatgatgtggaacaccgcaagctcaagctcaatgtttctatttttggcaggaacactccaatagagattttgcattcgcaagtggaaaaaattatataa

SEQ ID NO: 448 - protein, 176 aa, Helicobacter pylori
MMDWYAIQTYSGSEQSVKKAIENLANDHNIRDRIQEIIVPTEDIIEVSKKSKTKVTEQSLYPGYVFIKVDLDTVLWHKIQSLPRVSRFIGENKKPTPLSEADIGHILEKMNNRAAPKPKIFFEQGEVVRVVEGPFANFTATVEEYDVEHRKLKLNVSIFGRNTPIEILHSQVEKII

SEQ ID NO: 449 - DNA, 34 bp, Helicobacter pylori
gcggcggcccatatgatggattggtatgccatac

SEQ ID NO: 450 - DNA, 34 bp, Helicobacter pylori
gcgcggatcctataattttttccacttgcgaatg

SEQ ID NO: 451 - protein, 11 aa, Helicobacter pylori
QGEVVRVVEGP

SEQ ID NO: 452 - protein, 32 aa, Helicobacter pylori
ERSLYPGYVFIKVDLDTVLWHKIQSLPRVSRF

SEQ ID NO: 453 - protein, 8 aa, Helicobacter pylori
QEIIVPTE

SEQ ID NO: 454 - DNA, 552 bp, Streptococcus pneumoniae
atgaaaggaaatatcatggatagttttgataaagggtggtttgttttacaaacttattctggttatgaaaataaggtgaaagaaaatctattacaacgtgcacaaacctacaatatgttggataatattctacgcgttgaaattccaacacaaacagtgcaagttgaaaaaaatggaaagagaaaagaagtagaagaaaatcgctttccaggttatgttcttgtagaaatggtcatgacagatgaagcttggtttgttgttcgaaacacaccaaatgttacaggatttgtcggatcacacgggaacagatcaaaaccaactccattattggaacaagaaattcgcgacattttggtatctatgggacaaactgttcaagaatttgatttcgatgttgagattggtcaaactgtacgtattattgatggtgcttttgcagactacactggtaagattacagaaattgataataacaaagtgaaaatgattatctctatgtttggtaatgacacagttgcagaagtaaatctaaaccaaatcgcagaattataa

SEQ ID NO: 455 - protein, 183 aa, Streptococcus pneumoniae
MKGNIMDSFDKGWFVLQTYSGYENKVKENLLQRAQTYNMLDNILRVEIPTQTVQVEKNGKRKEVEENRFPGYVLVEMVMTDEAWFVVRNTPNVTGFVGSHGNRSKPTPLLEQEIRDILVSMGQTVQEFDFDVEIGQTVRIIDGAFADYTGKITEIDNNKVKMIISMFGNDTVAEVNLNQIAEL

SEQ ID NO: 456 - DNA, 552 bp, Streptococcus pneumoniae
atgaaaggaaatatcatggatagttttgataaagggtggtttgttttacaaacttattctggttatgaaaataaggtgaaagaaaatctattacaacgtgcacaaacctacaatatgttggataatattctacgcgttgaaattccaacacaaacagtgcaagttgaaaaaaatggaaagagaaaagaagtagaagaaaatcgctttccaggttatgttcttgtagaaatggtcatgacagatgaagcttggtttgttgttcgaaacacaccaaatgttacaggatttgtcggatcacacgggaacagatcaaaaccaactccattattggaacaagaaattcgtgacattttggtatctatgggacaaactgttcaagaatttgatttcgatgttgagattggtcaaactgtacgtattattgatggtgcttttgcagactacactggtaagattacagaaattgataataacaaagtgaaaatgattatctctatgtatggtaatgacacagttgcagaagtaaatctaaaccaaatcgcagaattataa

SEQ ID NO: 457 - protein, 183 aa, Streptococcus pneumoniae
MKGNIMDSFDKGWFVLQTYSGYENKVKENLLQRAQTYNMLDNILRVEIPTQTVQVEKNGKRKEVEENRFPGYVLVEMVMTDEAWFVVRNTPNVTGFVGSHGNRSKPTPLLEQEIRDILVSMGQTVQEFDFDVEIGQTVRIIDGAFADYTGKITEIDNNKVKMIISMYGNDTVAEVNLNQIAEL

SEQ ID NO: 458 - DNA, 35 bp, Streptococcus pneumoniae
gcggcggcccatatgaaaggaaatatcatggatag

SEQ ID NO: 459 - DNA, 37 bp, Streptococcus pneumoniae
gcgcggatcctaattctgcgatttggtttagatttac

SEQ ID NO: 460 - protein, 9 aa, Streptococcus pneumoniae
PGYVLVEMV

SEQ ID NO: 461 - protein, 8 aa, Streptococcus pneumoniae
GWFVLQTY

SEQ ID NO: 462 - protein, 14 aa, Streptococcus pneumoniae
ILRVEIPTQTVQVE

SEQ ID NO: 463 - DNA, 1035 bp, Helicobacter pylori
atgaaagttatcaaaacagcacctttgatcccatcagaaattaaggtgctagagaaagagggcaatcgggttaagatttctctggctccatttgagtttggttacgctgttacgctcgctcatcctattagaaggctcttgcttttaagctctgtggggtatgctcctgtaggtttaaagattgaaggcgtccatcatgagtttgactctttaaggggggttactgaagacgtgtcgctttttatcatgaatttaaaaaatatccgctttatagccaaggcgttagtggggcaggatagctctttagaaaaccaatcggttgtggtggattattcttttaaagggcctatggagcttagggctagggatttgaattctgagcagatagaaatcgtcaatccggaaatgcccctagcgacaatcaatgaagacgctcaattgaatttttcgctcattatttataaaggaatggggtatgtcccaagcgaaaacacaagggaattgatgcctgagggctacatgccgctagacggctctttcacgccgattaaaaaggtcgtttatgagattgaaaacgttctggttgagggcgatcccaactatgaaaaaatcatttttgatattgaaacagacgggcagattgacccttataaagcgtttttatcagcggtgaaagtgatgagcaagcaattgggtgtttttggcgaaagacccattgctaacacggagtattcaggcgattacgctcaaagagatgacgctaaagacttgagcgctaagattgaaagcatgaatttgagcgctaggtgttttaattgcttggataaaatcggcatcaagtatgtgggcgaactcgtgttgatgagcgaagaagagcttaagggcgtgaaaaacatgggtaaaaaatcctatgatgaaatcgctgaaaaattgaatgatttgggctatccggtaggcacagaattaagccctgaacaaagagagagtttaaagaaaagattagaaaaattagaagataaaggaggtaacgactga

SEQ ID NO: 464 - protein, 344 aa, Helicobacter pylori
MKVIKTAPLIPSEIKVLEKEGNRVKISLAPFEFGYAVTLAHPIRRLLLLSSVGYAPVGLKIEGVHHEFDSLRGVTEDVSLFIMNLKNIRFIAKALVGQDSSLENQSVVVDYSFKGPMELRARDLNSEQIEIVNPEMPLATINEDAQLNFSLIIYKGMGYVPSENTRELMPEGYMPLDGSFTPIKKVVYEIENVLVEGDPNYEKIIFDIETDGQIDPYKAFLSAVKVMSKQLGVFGERPIANTEYSGDYAQRDDAKDLSAKIESMNLSARCFNCLDKIGIKYVGELVLMSEEELKGVKNMGKKSYDEIAEKLNDLGYPVGTELSPEQRESLKKRLEKLEDKGGND

SEQ ID NO: 465 - DNA, 1035 bp, Helicobacter pylori
atgaaagttatcaaaacagcacctttgatcccatcagaaattaaggtgctagagaaagagggcaatcgggttaagatttctctggccccatttgagtttggttacgctgttacgctcgctcatcctattagaaggcttttgcttttaagctctgtggggtatgctcctataggtttaaagattgaaggcgtccatcatgagtttgactcactaaggggggttactgaagatgtgtcgctttttatcatgaatttaaagaatatccgttttatagctaaggcgttagtggggcaggatagctctttagaaaaccaatcggttgtggtggattattcttttaaagggcctatggagcttagggctagggatttgaattctgagcatatagaaatcgtcaatcctgaaatgcctctagccacaatcaacgaagacgctcaattgaatttttcgctcattatctataaaggaatggggtatgtcccaagcgaaaacacaagggaattaatgcctgagggctacatgccactagacggctctttcacgccgattaaaaaggtcgtttatgagattgaaaacgttttggttgagggcgatcccaactatgaaaaaatcatttttgatattgaaacagacgggcagattgacccttataaagcgtttttgtcagcggtgaaagtgatgagcaagcaactgggcgtttttggcgaaagacccattgctaacacggagtattcaggcgattacgctcaaagagatgacgctaaagatttgagcgctaagattgaaagcatgaatttgagcgctaggtgttttaattgcttggataaaatcggcatcaagtatgcgggcgaactcgtgttgatgagcgaagaagagcttaagggcgtgaaaaacatgggtaaaaaatcctatgatgaaatcgctgaaaaattgaatgatttgggctatccggtagacacagaattaagccctgaacaaagagagagtttaaagaaaagattagaaaaattagaagataaaggaggtaacgactga

SEQ ID NO: 466 - protein, 344 aa, Helicobacter pylori
MKVIKTAPLIPSEIKVLEKEGNRVKISLAPFEFGYAVTLAHPIRRLLLLSSVGYAPIGLKIEGVHHEFDSLRGVTEDVSLFIMNLKNIRFIAKALVGQDSSLENQSVVVDYSFKGPMELRARDLNSEHIEIVNPEMPLATINEDAQLNFSLIIYKGMGYVPSENTRELMPEGYMPLDGSFTPIKKVVYEIENVLVEGDPNYEKIIFDIETDGQIDPYKAFLSAVKVMSKQLGVFGERPIANTEYSGDYAQRDDAKDLSAKIESMNLSARCFNCLDKIGIKYAGELVLMSEEELKGVKNMGKKSYDEIAEKLNDLGYPVDTELSPEQRESLKKRLEKLEDKGGND

SEQ ID NO: 467 - DNA, 34 bp, Helicobacter pylori
gcggcggcccatatgaaagttatcaaaacagcac

SEQ ID NO: 468 - DNA, 31 bp, Helicobacter pylori
gcgcggatccgtcgttacctcctttatcttc

SEQ ID NO: 469 - protein, 46 aa, Helicobacter pylori
VKISLAPFEFGYAVTLAHPIRRLLLLSSVGYAPVGLKIEGVHHEFD

SEQ ID NO: 470 - protein, 9 aa, Helicobacter pylori
NQSVVVDYS

SEQ ID NO: 471 - protein, 23 aa, Helicobacter pylori
SARCFNCLDKIGIKYVGELVLMS

SEQ ID NO: 472 - DNA, 945 bp, Staphylococcus aureus
atgatagaaatcgaaaaacctagaattgagacaattgaaattagtgaagatgctaaattcggtaagttcgttgttgaaccactagaacgtggctacggtactacactaggaaactccttacgtcgtatcctactatcttcattaccaggtgcagccgttaagtatattgaaattgagggagttttacatgaattctcagcagtagacaatgtagttgaagatgtttctacaattattatgaacattaaacaattagcattgaaaatttactctgaagaagataaaactttagaaattgatgtacgtgatgaaggcgaagtaacagcaagcgacattacacatgatagtgatgttgaaattttaaacccagagcttaaaattgcaacagtatctaaaggtggtcacttaaaaattcgtctagttgctaacaagggtagaggttacgcattagcagaacaaaataatactagtgatttaccaattggtgtaatccctgttgattcattgtattcacctgttgaacgtgtgaactatactgttgaaaatacacgtgtaggtcaaagcagtgattttgataaattaacattggatgtttggactaatggttcaatcacaccacaagaatcagtttcattagcagcaaaaataatgactgaacacttgaatatcttcgttggtcttactgatgaagcgcaaaacgctgaaatcatgattgaaaaagaagaagatcaaaaagaaaaagtattagaaatgtctattgaagaattagacttatctgtacgttcatataactgcttaaaacgcgcaggaatcaattctgttcaagagttagctgacaaatctgaagctgacatgatgaaagtgcgtaatttaggtcgtaaatctttagaagaagttaaatacaaattagaagatttaggattaggattaagaaaagaagattga

SEQ ID NO: 473 - protein, 314 aa, Staphylococcus aureus
MIEIEKPRIETIEISEDAKFGKFVVEPLERGYGTTLGNSLRRILLSSLPGAAVKYIEIEGVLHEFSAVDNVVEDVSTIIMNIKQLALKIYSEEDKTLEIDVRDEGEVTASDITHDSDVEILNPELKIATVSKGGHLKIRLVANKGRGYALAEQNNTSDLPIGVIPVDSLYSPVERVNYTVENTRVGQSSDFDKLTLDVWTNGSITPQESVSLAAKIMTEHLNIFVGLTDEAQNAEIMIEKEEDQKEKVLEMSIEELDLSVRSYNCLKRAGINSVQELADKSEADMMKVRNLGRKSLEEVKYKLEDLGLGLRKED

SEQ ID NO: 474 - DNA, 945 bp, Staphylococcus aureus
atgatagaaatcgaaaaacctagaattgagacaattgaaattagtgaagatgctaaattcggtaagttcgttgttgaaccactagaacgtggctacggtactacactaggaaactccttacgtcgtatcctactatcttcattaccaggtgcagccgttaagtatattgaaattgagggagttttacatgaattctcagcagtagacaatgtagttgaagatgtttctacaattattatgaacattaaacaattagcattgaaaatttactctgaagaagataaaactttagaaattgatgtacgtgatgaaggcgaagtaacagcaagcgacattacacatgatagtgatgttgaaattttaaacccagagcttaaaattgcaacagtatctaaaggtggtcacttaaaaattcgtctagttgctaacaagggtagaggttacgcattagcagaacaaaataatactagtgatttaccaattggcgtaatccctgttgattcattgtattcacctgttgaacgtgtgaactatactgttgaaaatacacgtgtaggtcaaagcagtgattttgataaattaacattggatgtttggactaatggttcaatcacaccacaagaatcagtttcattagcagcaaaaataatgactgaacacttgaatatcttcgttggtcttactgatgaagcgcaaaacgctgaaatcatgattgaaaaagaagaagatcaaaaagaaaaagtattagaaatgtctattgaagaattagacttatctgtacgttcatataactgcttaaaacgcgcaggaatcaattctgttcaagagttagctgacaaatctgaagctgacatgatgaaagtgcgtaatttaggtcgtaaatctttagaagaagttaaatacaaattagaagatttaggattaggattaagaaaagaagattga

SEQ ID NO: 475 - protein, 314 aa, Staphylococcus aureus; identical to SEQ ID NO: 473

SEQ ID NO: 476 - DNA, 35 bp, Staphylococcus aureus
gcggcggcccatatgatagaaatcgaaaaacctag

SEQ ID NO: 477 - DNA, 33 bp, Staphylococcus aureus
gcgcggatccatcttcttttcttaatcctaatc

SEQ ID NO: 478 - protein, 22 aa, Staphylococcus aureus
DLPIGVIPVDSLYSPVERVNYT

SEQ ID NO: 479 - protein, 16 aa, Staphylococcus aureus
RRILLSSLPGAAVKYI

SEQ ID NO: 480 - protein, 8 aa, Staphylococcus aureus
GKFVVEPL

SEQ ID NO: 481 - DNA, 1734 bp, Helicobacter pylori
atgctattttcaaaactctttgcccccactctcaaagaaccccctaaagatgccgtgttaaaaagccataaacacttagctcaagcaggatacatttatcaagtaggcagcgggatttataattttttgcctttagctaaaaaagtgctagacaagatagaaaacatcacgcacaaacgcatgcaagagcatggggcgcaaaatattttaatgagttttgtggttttggcgagcttgtgggaaaaatcaggccgtttggataaatacggcaaggaattattggtttttaaagaccgaaaagacaatgattttgttttaagccccactttagaagaaaatatcaccgaaattgccgctaatttcattaaaagttacaagcaattgcccgtccatctctatcaaatccacacgaaattccgtgatgaaatccgcccaagatttgggctggtgagagcgagggaatttatcatgaaagatggttacagctttcatgaagacgctgagagcttggataaggaatttttaaacacgcaaagcgcttataaagagattttaagcgatttgggtttggattttcgcattgtggaagcggatagcggggcgattggagggagtaaaagcagggaatttgtcgttttaaccgaatgcggggaagacacgatcgtggtgtgtcaaaattgcgattatgccgctaacattgaaatcgctaaacgctctaaaaggcctgagcctttaaatgtcccaaaagcgcaattagcgaaattccctacccctaataccactagcgcgcaaagcgtggcggagttttttaaaacagagccttattttgtcttaaaagcgcttgttagaaaagtgatccataaagataaagaaaccctagcgtgcttttttgtcaggggcgatgacaatttagaggaagttaaagccctaaacgccttgaacattataggagcgaatgctttagaattgagagaggcgagtcaaaaagatttggataatgtggggttaatagcgggttttatagggccttatggcttgaaaaagcatgtttcttacattatttttgatgaagatttaaaagagggcgattgcttgatcgctggggctaatgaaaaggattttcatgcggtgggcgtggatttaaaagggtttgaaaatcttgtttatgcggatattgtccaggttaaagagagcgatcgttgccctaattgtcaaggagcgttgaaataccataagagtttggaggtggggcatattttcaaactcgggcaaggctatgctaaaagcttgaaggctagtttcttggataagaatggtaaagagcaattttttgaaatggggtgctatgggataggcattagccggttgctcagcgcgattttagagcaaaaaagcgatgatttaggctgtgtgtggacgaaaaataccgccccttttgatgtggtgatcgtggtttctaattggaaagatgaagcgcaaaaaaaactcgcttttgaagtgtatgaaaggctgctccaaaagggcgttgatgcgctgctagatgacagagacgcgcgttttggggcgaagatgagggattttgaattgattggggaacgattggcgctcattattgggaagcaaactttagagagcaaagaatttgaatgcatcaaacgcgctaatttggaaaaacaaacgattaaagacattgaattagaagaaaaaattttagaaatgttagaaagcgaataa

SEQ ID NO: 482 - protein, 577 aa, Helicobacter pylori
MLFSKLFAPTLKEPPKDAVLKSHKHLAQAGYIYQVGSGIYNFLPLAKKVLDKIENITHKRMQEHGAQNILMSFVVLASLWEKSGRLDKYGKELLVFKDRKDNDFVLSPTLEENITEIAANFIKSYKQLPVHLYQIHTKFRDEIRPRFGLVRAREFIMKDGYSFHEDAESLDKEFLNTQSAYKEILSDLGLDFRIVEADSGAIGGSKSREFVVLTECGEDTIVVCQNCDYAANIEIAKRSKRPEPLNVPKAQLAKFPTPNTTSAQSVAEFFKTEPYFVLKALVRKVIHKDKETLACFFVRGDDNLEEVKALNALNIIGANALELREASQKDLDNVGLIAGFIGPYGLKKHVSYIIFDEDLKEGDCLIAGANEKDFHAVGVDLKGFENLVYADIVQVKESDRCPNCQGALKYHKSLEVGHIFKLGQGYAKSLKASFLDKNGKEQFFEMGCYGIGISRLLSAILEQKSDDLGCVWTKNTAPFDVVIVVSNWKDEAQKKLAFEVYERLLQKGVDALLDDRDARFGAKMRDFELIGERLALIIGKQTLESKEFECIKRANLEKQTIKDIELEEKILEMLESE

SEQ ID NO: 483 - DNA, 1734 bp, Helicobacter pylori
atgctattttcaaaactctttgcccccactctcaaagaaccccctaaagatgccgtgttaaaaagccataaacacctagctcaagcaggatacatttatcaagtaggcagcgggatttataattttttgcctttagctaaaaaagtgctagacaagatagaaaacatcacgcacaaacgcatgcaagagcatggggcgcaaaacattttaatgagttttgtggttttggcgagtttgtgggaaaaatcaggccgtttggataaatacggcaaggaattattggtttttaaagaccgaaaagacaatgattttgttttaagccccactttagaagaaaatatcaccgaaattgccgctaatttcattaaaagctacaagcaattacccgtccatctctatcaaatccacacgaaattccgtgatgaaatccgcccgcgattcgggctggtgagagcgagggaatttatcatgaaagatggttacagctttcatgaagacgctgaaagcttggataaggaatttttaaacacgcaaagcgcttataaagagattttaagcgatttgggtttggattttcgcattgtggaagcggatagcggggcgattggagggagtaaaagcagggaatttgtcgttttaaccgaatgcggggaagacacgatcgtggtgtgtcaaaattgcgattatgccgctaacattgaaatcgctaaacgctctaaaaggcctgagcctttaaatgtcccaaaagcgcaattagcgaaattccctacccctaataccactagcgcgcaaagcgtggcggagttttttaaaacagagccttattttgtcttaaaagcgcttgttagaaaagtgatccataaagataaagaaaccctagcgtgcttttttgtcaggggcgatgacaatttagaggaagttaaagccctaaacgccttgaacattataggagcgaatgctttagaattgagagaggcgagtcaaaaagatttggataatgtggggttaatagcgggttttatagggccttatggcttgaaaaagcatgtttcttacattatttttgatgaagatttaaaagagggcgattgcttgatcgctggggctaatgaaaaggattttcatgcggtgggcgtggatttaaaagggtttgaaaatcttgtttatgcggatattgtccaggttaaagagagcgatcattgccccaattgtcaaggagcgttgaaataccataagagtttggaagtggggcatattttcaaactcgggcaaggctatgctaaaagcttgaaggctagtttcttggataagaatggtaaggagcaattttttgaaatggggtgctatgggataggcattagccgattgctcagcgcgattttagagcaaaaaagcgatgatctaggctgtgtatggacgaaaaataccgccccttttgatgtggtgatcgtggtttctaattggaaagatgaagcgcaaaaaaaactcgcttttgaagtgtatgaaaggctgcttcaaaagggcgttgatgcgctgttagatgacagagacgctcgttttggggcgaagatgagggattttgaattgattggggaacgattggcgctcattattgggaagcaaactttagaaaataaagaatttgaatgcatcaaacgcgctaatttagaaaaacaaacgattaaagacattgaattagaagaaaaaattttagaaatgttagaaagcgaataa

SEQ ID NO: 484 - protein, 577 aa, Helicobacter pylori
MLFSKLFAPTLKEPPKDAVLKSHKHLAQAGYIYQVGSGIYNFLPLAKKVLDKIENITHKRMQEHGAQNILMSFVVLASLWEKSGRLDKYGKELLVFKDRKDNDFVLSPTLEENITEIAANFIKSYKQLPVHLYQIHTKFRDEIRPRFGLVRAREFIMKDGYSFHEDAESLDKEFLNTQSAYKEILSDLGLDFRIVEADSGAIGGSKSREFVVLTECGEDTIVVCQNCDYAANIEIAKRSKRPEPLNVPKAQLAKFPTPNTTSAQSVAEFFKTEPYFVLKALVRKVIHKDKETLACFFVRGDDNLEEVKALNALNIIGANALELREASQKDLDNVGLIAGFIGPYGLKKHVSYIIFDEDLKEGDCLIAGANEKDFHAVGVDLKGFENLVYADIVQVKESDHCPNCQGALKYHKSLEVGHIFKLGQGYAKSLKASFLDKNGKEQFFEMGCYGIGISRLLSAILEQKSDDLGCVWTKNTAPFDVVIVVSNWKDEAQKKLAFEVYERLLQKGVDALLDDRDARFGAKMRDFELIGERLALIIGKQTLENKEFECIKRANLEKQTIKDIELEEKILEMLESE

SEQ ID NO: 485 - DNA, 35 bp, Helicobacter pylori
gcggcggcccatatgctattttcaaaactctttgc

SEQ ID NO: 486 - DNA, 40 bp, Helicobacter pylori
gcgcggatccttcgctttctaacatttctaaaattttttc

SEQ ID NO: 487 - protein, 10 aa, Helicobacter pylori
PFDVVIVVSN

SEQ ID NO: 488 - protein, 12 aa, Helicobacter pylori
DTIVVCQNCDYA

SEQ ID NO: 489 - protein, 12 aa, Helicobacter pylori
ILMSFVVLASLW

SEQ ID NO: 490 - DNA, 1275 bp, Streptococcus pneumoniae
atgttagatatcaaacgtattcgtacagattttgaagctgtcgcagaaaaattagctacacgtggtgtagatgctgctgtcttgaatgaaatgaaagaaatcgatgctaaacgtcgtaacatcttggtcaaggttgaaactctcaaagcagaacgtaacacagtttctgctgagattgcccaagctaagcgcaacaaggaaaatacagatgacaagattgctgccatgcaaaatctatctgctgaggttaaagccttggatgctgaattggcagaaatcgatgctaaattgacagaatttacaacgactcttccaaatatcccagctgacagcgttcctgttggggctgacgaagacgacaatgtggaagttcgccgttggggtactccacgcgagtttgacttcgaacctaaagctcactgggatctcggtgaagaccttggtatccttgactgggaacgcggtggtaaggtaacaggcgctcgcttcctcttctataaaggcctcggtgctcgtttggaacgtgctatctacaactttatgttggatgaacatggaaaagaaggctatactgaagtcatcacaccttacatagtcaaccatgattctatgtttggtactggtcagtatccaaaatttaaggaagatacttttgaactcagcgataccaactttgtcttgattccaactgctgaagttcctctgacaaactactaccgtgatgaaatcttagacggcaaagatcttccaatctacttcactgccatgagtccgtcattccgttctgaggctggttctgccggtcgtgatacgcgtggcttgatccgtttgcaccaattccacaaggttgaaatggtcaaatttgccaaaccagaagaatcttacgaagaattggaaaaaatgacagccaacgctgaaaacattcttcaaaaactcaaccttccataccgtgtcgttgctctctctactggagatatgggcttctcagctgcgaagacttacgacttggaagtgtggattccagcacaaaacaattaccgtgaaatctcaagctgttcaaacacagaagatttccaagcccgtcgtgcccaaatccgttaccgtgatgaagcagatggcaaggtgaaactccttcataccttgaacggttctggacttgcagttggacgtacagtggctgcaattcttgaaaattaccaaaatgaagatggttctgtgaccatcccagaagcacttcgtccatacatgggtggagctgaagtcatcaaaccataa

SEQ ID NO: 491 - protein, 424 aa, Streptococcus pneumoniae
MLDIKRIRTDFEAVAEKLATRGVDAAVLNEMKEIDAKRRNILVKVETLKAERNTVSAEIAQAKRNKENTDDKIAAMQNLSAEVKALDAELAEIDAKLTEFTTTLPNIPADSVPVGADEDDNVEVRRWGTPREFDFEPKAHWDLGEDLGILDWERGGKVTGARFLFYKGLGARLERAIYNFMLDEHGKEGYTEVITPYIVNHDSMFGTGQYPKFKEDTFELSDTNFVLIPTAEVPLTNYYRDEILDGKDLPIYFTAMSPSFRSEAGSAGRDTRGLIRLHQFHKVEMVKFAKPEESYEELEKMTANAENILQKLNLPYRVVALSTGDMGFSAAKTYDLEVWIPAQNNYREISSCSNTEDFQARRAQIRYRDEADGKVKLLHTLNGSGLAVGRTVAAILENYQNEDGSVTIPEALRPYMGGAEVIKP

SEQ ID NO: 492 - DNA, 1275 bp, Streptococcus pneumoniae
atgttagatatcaaacgtattcgtacagattttgaagctgtcgcagaaaaattagctacacgtggtgtagatgctgctgtcttgaatgaaatgaaagaaatcgatgctaaacgtcgtaacatcttggtcaaggttgaaactctcaaagcagaacgtaacacagtttctgctgagattgcccaagctaagcgcaacaaggaaaatacagatgacaagattgctgccatgcaaaatctatctgctgaggttaaagccttggatgctgaattggcagaaatcgatgctaaattgacagaatttacaacgactcttccaaatatcccagctgacagcgttcctgttggggctgacgaagacgacaatgtggaagttcgccgttggggtactccacgcgagtttgacttcgaacctaaagctcactgggatctcggtgaagaccttggtatccttgactgggaacgcggtggtaaggtaacaggcgctcgcttcctcttctataaaggcctcggtgctcgtttggaacgtgctatctacaactttatgttggatgaacatggaaaagaaggctatactgaagtcatcacaccttacatagtcaaccatgattctatgtttggtactggtcagtatccaaaatttaaggaagatacttttgaactcagcgataccaactttgtcttgattccaactgctgaagttcttctgacaaactactaccgtgatgaaatcttagacggcaaagatcttccaatttacttcactgctatgagtccgtcattccgttctgaggctggttctgccggtcgtgatacgcgtggcttgatccgtttgcaccaattccacaaggttgaaatggtcaaatttgccaaaccagaagaatcttacgaagaattggaaaaaatgacagccaacgctgaaaacattcttcaaaaactcaaccttccataccgtgtcgttgctctctctactggagatatgggcttctcagctacgaagacttacgacttggaagtgtggattccagcacaaaacaattaccgtgaaatctcaagctgttcaaacacagaagatttccaagcccgtcgtgcccaaatccgttaccgtgatgaagcagatggcaaggtgaaactccttcataccttgaacggttctggacttgcagttggacgtacagtggctgcaattcttgaaaattaccaaaatgaagatggttctgtgaccatcccagaagcacttcgtccatacatgggtggagctgaagtcatcaaaccataa

SEQ ID NO: 493 - protein, 424 aa, Streptococcus pneumoniae
MLDIKRIRTDFEAVAEKLATRGVDAAVLNEMKEIDAKRRNILVKVETLKAERNTVSAEIAQAKRNKENTDDKIAAMQNLSAEVKALDAELAEIDAKLTEFTTTLPNIPADSVPVGADEDDNVEVRRWGTPREFDFEPKAHWDLGEDLGILDWERGGKVTGARFLFYKGLGARLERAIYNFMLDEHGKEGYTEVITPYIVNHDSMFGTGQYPKFKEDTFELSDTNFVLIPTAEVLLTNYYRDEILDGKDLPIYFTAMSPSFRSEAGSAGRDTRGLIRLHQFHKVEMVKFAKPEESYEELEKMTANAENILQKLNLPYRVVALSTGDMGFSATKTYDLEVWIPAQNNYREISSCSNTEDFQARRAQIRYRDEADGKVKLLHTLNGSGLAVGRTVAAILENYQNEDGSVTIPEALRPYMGGAEVIKP

SEQ ID NO: 494 - DNA, 35 bp, Streptococcus pneumoniae
gcggcggcccatatgttagatatcaaacgtattcg

SEQ ID NO: 495 - DNA, 30 bp, Streptococcus pneumoniae
gcgcggatcctggtttgatgacttcagctc

SEQ ID NO: 496 - protein, 12 aa, Streptococcus pneumoniae
TEVITPYIVNHD

SEQ ID NO: 497 - protein, 15 aa, Streptococcus pneumoniae
ILQKLNLPYRVVALS

SEQ ID NO: 498 - protein, 8 aa, Streptococcus pneumoniae
KVKLLHTL

SEQ ID NO: 499 - DNA, 1215 bp, Pseudomonas aeruginosa
atgaaattgccgatctacctcgattactccgcgaccactcccgtcgatccccgcgtcgcccagaaaatgagcgaatgcctgctgatggacggcaacttcggcaacccggcttcgcgttcccacgtgttcggctggaaagccgaagaagccgtggagaacgcccgtcgccaggtggccgagctggtcaacgccgatccccgcgagatcgtctggacctccggcgccaccgagtccgacaacctggcgatcaagggcgtcgcgcacttctactcgggcaagggcaagcacatcatcacctcgaagatcgagcacaaggcggtcctcgacacctgccgccagctggagcgcgaaggtttcgaagtgacctacctggagccgggagaagatggcctgatcactccggctctggtcgaggcggcgctgcgtgacgacaccatcctggtctcggtcatgcacgtgaacaacgagatcggcaccgtcaacgacatcgccgccatcggcgagctgacccgctcccgcggcgtgctgttccacgtcgacgccgcacagtcgaccggcaaggtcgagatcgacctggacaagctcaaggtcgacctgatgtccttctccgcgcacaagacctacggcccgaaaggcattggcgcgctctacgtccggcgcaagccgcgcgtccgcatcgagggtcagatgcacggtggcggccatgagcgcggcatgcgttccggcaccctagccacccaccagatcgtcggcatgggcgaggcgttccgcatcgccaaggaagaaatggcccaggagaacgcccgcgtgctggcgctccgcgaccgcttcttcgcgcagatcgacggcctggaagagctctacatcaacggcagcatgacctcccgcgtcccgcacaacctcaacgtcagcttcaactacgtcgagggcgagtcgctgatcatggcgctcaaggacctcgcggtctcctccggctcggcctgtacctcggcgtccctggaaccgtcctacgtattgcgcgccctgggccgcaacgacgaactggcgcatagctccatccgcttcaccttcggtcgcttcaccaccgaggaagagatcgactatgccgcgaagaaggtggtcgaggccgtttccaagctgcgcgaactgtcgccgctgtgggatatgtacaaagagggcgtcgacctgtcccaggtcgaatggcaggcgcactga

SEQ ID NO: 500 - protein, 404 aa, Pseudomonas aeruginosa
MKLPIYLDYSATTPVDPRVAQKMSECLLMDGNFGNPASRSHVFGWKAEEAVENARRQVAELVNADPREIVWTSGATESDNLAIKGVAHFYSGKGKHIITSKIEHKAVLDTCRQLEREGFEVTYLEPGEDGLITPALVEAALRDDTILVSVMHVNNEIGTVNDIAAIGELTRSRGVLFHVDAAQSTGKVEIDLDKLKVDLMSFSAHKTYGPKGIGALYVRRKPRVRIEGQMHGGGHERGMRSGTLATHQIVGMGEAFRIAKEEMAQENARVLALRDRFFAQIDGLEELYINGSMTSRVPHNLNVSFNYVEGESLIMALKDLAVSSGSACTSASLEPSYVLRALGRNDELAHSSIRFTFGRFTTEEEIDYAAKKVVEAVSKLRELSPLWDMYKEGVDLSQVEWQAH

SEQ ID NO: 501 - DNA, 1215 bp, Pseudomonas aeruginosa
atgaaattgccgatctacctcgattactccgcgaccactcccgtcgatccccgcgtcgcccagaaaatgagcgaatgcctgctgatggacggtaacttcggcaacccggcttcgcgttcccacgtgttcggctggaaagccgaagaagccgtggagaacgcccgtcgccaggtggccgagctggtcaacgccgatccccgcgagatcgtctggacctccggcgccaccgagtccgacaacctggcgatcaagggcgtcgcgcacttctactcgggcaagggcaagcacatcatcacctcgaagatcgagcacaaggcggtcctcgacacctgtcgccagctggagcgcgaaggtttcgaagtgacctacctggagccgggagaagatggtctgatcactccggctctggtcgaggcggcgctgcgtgacgacaccatcctggtctcggtcatgcacgtgaacaacgagatcggcaccgtcaacgacatcgccgccatcggcgagctgacccgctcccgcggcgtgctgttccacgtcgacgccgcacagtcgaccggcaaggtcgagatcgacctggacaagctcaaggtcgacctgatgtccttctccgcgcacaagacctacggcccgaaaggcattggcgcgctctacgtccggcgcaagccgcgcgttcgcatcgaggcccagatgcacggcggcggccacgagcgcggcatgcgctccggcaccctggccacccaccagatcgtcggcatgggcgaggcgttccgcatcgccaaggaagaaatggcccaggagaacgcccgcgtgctggcgctccgcgaccgcttcttcgcgcagatcgacggcctggaagagctctacatcaacggcagcatgacctcccgcgtcccgcacaacctcaacgtcagcttcaactacgtcgagggcgagtcgctgatcatggcgctcaaggacctcgcggtctcctccggttcggcctgtacctcggcgtccctggaaccgtcctacgtattgcgcgccctgggccgcaacgacgaactggcgcatagctccatccgcttcaccttcggtcgcttcaccaccgaggaagagatcgactatgccgcgaagaaggtggtcgaggccgtttccaagttgcgcgaactgtcgccgctgtgggatatgtacaaagagggcgtcgacctgtcccaggtcgaatggcaggcgcactga

SEQ ID NO: 502 - protein, 404 aa, Pseudomonas aeruginosa
MKLPIYLDYSATTPVDPRVAQKMSECLLMDGNFGNPASRSHVFGWKAEEAVENARRQVAELVNADPREIVWTSGATESDNLAIKGVAHFYSGKGKHIITSKIEHKAVLDTCRQLEREGFEVTYLEPGEDGLITPALVEAALRDDTILVSVMHVNNEIGTVNDIAAIGELTRSRGVLFHVDAAQSTGKVEIDLDKLKVDLMSFSAHKTYGPKGIGALYVRRKPRVRIEAQMHGGGHERGMRSGTLATHQIVGMGEAFRIAKEEMAQENARVLALRDRFFAQIDGLEELYINGSMTSRVPHNLNVSFNYVEGESLIMALKDLAVSSGSACTSASLEPSYVLRALGRNDELAHSSIRFTFGRFTTEEEIDYAAKKVVEAVSKLRELSPLWDMYKEGVDLSQVEWQAH

SEQ ID NO: 503 - DNA, 33 bp, Pseudomonas aeruginosa
gcggcggcccatatgaaattgccgatctacctc

SEQ ID NO: 504 - DNA, 28 bp, Pseudomonas aeruginosa
gcgcggatccgtgcgcctgccattcgac

SEQ ID NO: 505 - protein, 10 aa, Pseudomonas aeruginosa
DTILVSVMHV

SEQ ID NO: 506 - protein, 11 aa, Pseudomonas aeruginosa
SRGVLFHVDAA

SEQ ID NO: 507 - protein, 9 aa, Pseudomonas aeruginosa
ITPALVEAA

SEQ ID NO: 508 - DNA, 723 bp, Eschericia coli
atgcaggataaggattttttcagctggcgtcgcacgatgctgttgcgttttcagaggatggagaccgcagaagaggtctaccatgaaattgagcttcaggctcagcagctggagtacgattactattcgttatgtgtccgccacccggtaccattcactcgacctaaagtggctttttacaccaattaccctgaggcgtgggttagttattatcaggcaaaaaactttctcgcaattgatccggtgctgaaccctgaaaactttagtcagggccatttaatgtggaatgatgacttattcagcgaagcacagccgttatgggaagccgcgcgcgcacatggtttacgccgcggtgtcactcagtatttaatgctgccaaaccgggcgctgggctttttgtccttttcccgttgcagcgcgcgcgaaatacccattcttagtgatgaactgcaattaaaaatgcagttactggtgcgcgaaagtctgatggctctgatgcgtttaaatgatgaaatagtgatgacgccagagatgaatttcagcaagcgcgaaaaagaaattctgaggtggacggcggaagggaaaacatcagcagagatagcgatgattttgtcaatctctgagaatacggtcaatttccaccagaaaaacatgcagaaaaaaattaatgcaccaaataagacccaggttgcctgttacgcggccgctactggcttaatttga

SEQ ID NO: 509 - protein, 240 aa, Eschericia coli
MQDKDFFSWRRTMLLRFQRMETAEEVYHEIELQAQQLEYDYYSLCVRHPVPFTRPKVAFYTNYPEAWVSYYQAKNFLAIDPVLNPENFSQGHLMWNDDLFSEAQPLWEAARAHGLRRGVTQYLMLPNRALGFLSFSRCSAREIPILSDELQLKMQLLVRESLMALMRLNDEIVMTPEMNFSKREKEILRWTAEGKTSAEIAMILSISENTVNFHQKNMQKKINAPNKTQVACYAAATGLI

SEQ ID NO: 510 - DNA, 723 bp, Eschericia coli; identical to SEQ ID NO: 508

SEQ ID NO: 511 - protein, 240 aa, Eschericia coli; identical to SEQ ID NO: 509

SEQ ID NO: 512 - DNA, 35 bp, Eschericia coli
gcggcggcccatatgcaggataaggattttttcag

SEQ ID NO: 513 - DNA, 29 bp, Eschericia coli
gcgcggatccaattaagccagtagcggcc

SEQ ID NO: 514 - protein, 39 aa, Eschericia coli
EEVYHEIELQAQQLEYDYYSLCVRHPVPFTRPKVAFYTN

SEQ ID NO: 515 - protein, 11 aa, Eschericia coli
KTQVACYAAAT

SEQ ID NO: 516 - protein, 21 aa, Eschericia coli
EAWVSYYQAKNFLAIDPVLNP

SEQ ID NO: 517 - DNA, 606 bp, Pseudomonas aeruginosa
atgatcgaattgctctctgaatcgctggaagggctttccgccgccatgatcgccgagctgggacgctaccggcatcaggtcttcatcgagaagctgggctgggacgtggtctccacctccagggtccgcgaccaggaattcgaccagttcgaccatccgcaaacccgctacatcgtcgccatgagccgccagggcatctgcggttgcgcccgcctgctgccgacgaccgacgcctacctgctcaaggacgtcttcgcctacctgtgcagcgaaaccccgccgagcgatccgtcggtctgggagctttcgcgctacgccgccagcgcggcggacgatccgcagctggcgatgaagatattctggtccagcctgcaatgcgcctggtacctgggcgccagttcggtggtggcggtgaccaccacggccatggagcgctatttcgttcgcaacggcgtgatcctccagcgcctcggcccgccgcagaaggtcaagggcgagacgctggtcgcgatcagcttcccggcctaccaggagcgcggcctggagatgctgctgcgctaccacccggaatggctgcagggcgtaccgctgtcgatggcggtgtga

SEQ ID NO: 518 - protein, 201 aa, Pseudomonas aeruginosa
MIELLSESLEGLSAAMIAELGRYRHQVFIEKLGWDVVSTSRVRDQEFDQFDHPQTRYIVAMSRQGICGCARLLPTTDAYLLKDVFAYLCSETPPSDPSVWELSRYAASAADDPQLAMKIFWSSLQCAWYLGASSVVAVTTTAMERYFVRNGVILQRLGPPQKVKGETLVAISFPAYQERGLEMLLRYHPEWLQGVPLSMAV

SEQ ID NO: 519 - DNA, 606 bp, Pseudomonas aeruginosa
atgatcgaattgctctctgaatcgctggaagggctttccgccgccatgatcgccgagctgggacgctaccggcatcaggtcttcatcgagaagctgggctgggacgtggtctccacctccagggtccgcgaccaggagttcgaccagttcgaccatccgcaaacccgctacatcgtcgccatgggccgccagggtatctgcggttgcgcccgcctgttgccgacgaccgacgcctacctgctcaaggaagtcttcgcctacctgtgcagcgaaaccccgcccagcgatcagtcggtatgggagctttcgcgctacgccgccagcgcggcggacgatccgcaactggcgatgaagatattctggtccagcctgcaatgtgcctggtacctaggcgccagttcggtggtggcggtgaccaccacggccatggagcgctatttcgttcgcaacggcgtgatcctccagcgcctcggcccgccgcagaaggtcaagggcgagacgctggtcgcgatcagcttcccggcctaccaggagcgcggcctggagatgctgctgcgctaccacccggaatggctgcagggcgtaccgctgtcgatggcggtgtga

SEQ ID NO: 520 - protein, 201 aa, Pseudomonas aeruginosa
MIELLSESLEGLSAAMIAELGRYRHQVFIEKLGWDVVSTSRVRDQEFDQFDHPQTRYIVAMGRQGICGCARLLPTTDAYLLKEVFAYLCSETPPSDQSVWELSRYAASAADDPQLAMKIFWSSLQCAWYLGASSVVAVTTTAMERYFVRNGVILQRLGPPQKVKGETLVAISFPAYQERGLEMLLRYHPEWLQGVPLSMAV

SEQ ID NO: 521 - DNA, 35 bp, Pseudomonas aeruginosa
gcggcggcccatatgatcgaattgctctctgaatc

SEQ ID NO: 522 - DNA, 27 bp, Pseudomonas aeruginosa
gcgcggatcccaccgccatcgacagcg

SEQ ID NO: 523 - protein, 29 aa, Pseudomonas aeruginosa
QGICGCARLLPTTDAYLLKDVFAYLCSET

SEQ ID NO: 524 - protein, 20 aa, Pseudomonas aeruginosa
WSSLQCAWYLGASSVVAVTT

SEQ ID NO: 525 - protein, 12 aa, Pseudomonas aeruginosa
GETLVAISFPAY

SEQ ID NO: 526 - DNA, 606 bp, Pseudomonas aeruginosa
atgatcgtacaaattggtcggcgcgaagagttcgataaaaaactgctgggcgagatgcacaagttgcgtgctcaagtgttcaaggagcgcaaaggctgggacgttagtgtcatcgacgagatggaaatcgatggttatgacgcactcagtccttattacatgttgatccaggaagatactcctgaagcccaggttttcggttgctggcgaattctcgataccactggcccctacatgctgaagaacaccttcccggagcttctgcacggcaaggaagcgccttgctcgccgcacatctgggaactcagccgtttcgccatcaactctggacagaaaggctcgctgggcttttccgactgtacgctggaggcgatgcgcgcgctggcccgctacagcctgcagaacgacatccagacgctggtgacggtaaccaccgtaggcgtggagaagatgatgatccgtgccggcctggacgtatcgcgcttcggtccgcacctgaagatcggcatcgagcgcgcggtggccttgcgcatcgaactcaatgccaagacccagatcgcgctttacgggggagtgctggtggaacagcgactggcggtttcatga

SEQ ID NO: 527 - protein, 201 aa, Pseudomonas aeruginosa
MIVQIGRREEFDKKLLGEMHKLRAQVFKERKGWDVSVIDEMEIDGYDALSPYYMLIQEDTPEAQVFGCWRILDTTGPYMLKNTFPELLHGKEAPCSPHIWELSRFAINSGQKGSLGFSDCTLEAMRALARYSLQNDIQTLVTVTTVGVEKMMIRAGLDVSRFGPHLKIGIERAVALRIELNAKTQIALYGGVLVEQRLAVS

SEQ ID NO: 528 - DNA, 606 bp, Pseudomonas aeruginosa
atgatcgtacaaattggtcggcgcgaagagttcgataaaaaactgctgggcgagatgcacaagttgcgtgctcaagtgttcaaggagcgcaaaggctgggacgttagtgtcatcgacgagatggaaatcgatggttatgacgcactcagtccttattacatgttgatccaggaagatactcctgaagcccaggttttcggttgctggagaattctagatcccactgggccctacatgctgaagaacaccttcccggagtttctgcacggcaaggaaacgccttgctctccgcacatgtgggaactcagccgtttcgccatcaactctggacagaaaggctcgctgggcttttccgactgtacgctggaggagatgcgcgcgctggcccgctacagcctgccgaacgacatccagacgctggtgacggtaaccactgtaggcgtggagaagatgatgatccgtgccagcctggacgtatcgcgcttcggtccgcacctgaagatcggcatcgagcgcgcggtggccttgcgcatcgaactcaatgccaagacccagatcgcgctttacgggggagtgctggtggaacagcgactggcggtttcatga

SEQ ID NO: 529 - protein, 201 aa, Pseudomonas aeruginosa
MIVQIGRREEFDKKLLGEMHKLRAQVFKERKGWDVSVIDEMEIDGYDALSPYYMLIQEDTPEAQVFGCWRILDPTGPYMLKNTFPEFLHGKETPCSPHMWELSRFAINSGQKGSLGFSDCTLEEMRALARYSLPNDIQTLVTVTTVGVEKMMIRASLDVSRFGPHLKIGIERAVALRIELNAKTQIALYGGVLVEQRLAVS

SEQ ID NO: 530 - DNA, 33 bp, Pseudomonas aeruginosa
gcggcggcccatatgatcgtacaaattggtcgg

SEQ ID NO: 531 - DNA, 28 bp, Pseudomonas aeruginosa
gcgcggatcctgaaaccgccagtcgctg

SEQ ID NO: 532 - protein, 14 aa, Pseudomonas aeruginosa
QIALYGGVLVEQRL

SEQ ID NO: 533 - protein, 12 aa, Pseudomonas aeruginosa
QTLVTVTTVGVE

SEQ ID NO: 534 - protein, 21 aa, Pseudomonas aeruginosa
PELLHGKEAPCSPHIWELSRF

SEQ ID NO: 535 - DNA, 678 bp, Staphylococcus aureus
ttggtggtagataattttaggagggcacttatgaatatcattttgatgggtttacctggcgcaggtaaaggaactcaagcaagtgaaattgtcaagaaattcccaataccccacatttcaactggtgacatgttcagaaaagctataaaagaagaaactgaattaggtaaagaagctaagtcttatatggaccgtggcgaattagttcctgatgaagtgactgtaggtatcgttaaggaaagaatttctgaagacgatgcaaaaaaaggctttttattagatggcttcccaagaacaatcgagcaagctgaggcattaaataatattatgtctgagcttgacagaaacattgatgctgtcatcaatatcgaagttccggaagaagaattaatgaaccgtcttacaggtcgtcgaatctgtgagtcatgtggtacaacgtatcatcttgtatttaatcctccgaaggtcgaaggtatttgtgatatcgatggtggtaaattgtatcaacgagaagatgataatcctgaaacggtagctaatcgtttgagtgttaatattaaacaatctaagcctattttagatttctatgatcaaaaaggtgtattgaaaaatattgatggttcaaaagatattagcgacgttaccaaagatgtcattgatattttagatcatttgtaa

SEQ ID NO: 536 - protein, 225 aa, Staphylococcus aureus
LVVDNFRRALMNIILMGLPGAGKGTQASEIVKKFPIPHISTGDMFRKAIKEETELGKEAKSYMDRGELVPDEVTVGIVKERISEDDAKKGFLLDGFPRTIEQAEALNNIMSELDRNIDAVINIEVPEEELMNRLTGRRICESCGTTYHLVFNPPKVEGICDIDGGKLYQREDDNPETVANRLSVNIKQSKPILDFYDQKGVLKNIDGSKDISDVTKDVIDILDHL

SEQ ID NO: 537 - DNA, 678 bp, Staphylococcus aureus
ttggtggtagataattttaggagggcacttatgaatatcattttgatgggtttacctggcgcaggtaaaggaactcaagcaagtgaaattgtcaagaaattcccaataccccacatttcaactggtgacatgttcagaaaagctataaaagaagaaactgaattaggtaaagaagctaagtcttatatggaccgtggcgaattagttcctgatgaagtgactgtaggtatcgttaaggaaagaatttctgaagacgatgcaaaaaaaggctttttattagatggcttcccaagaacaatcgagcaagctgaggcattaaataatattttgtctgagcttgacagaaacattgatgctgtcatcaatatcgaagttccggaagaagaattaatgaaccgtcttacaggtcgtcgaatctgtgagtcatgtggtacaacgtatcatcttgtatttaatcctccgaaggtcgaaggtatttgtgatatcgatggtggtaaattgtatcaacgagaagatgataatcctgaaacggtagctaatcgtttgagtgttaatattaaacaatctaagcctattttagatttctatgatcaaaaaggtgtattgaaaaatattgttggttcaaaagatattagcgacgttaccaaagatgtcattgatattttagatcatttgtaa

SEQ ID NO: 538 - protein, 225 aa, Staphylococcus aureus
LVVDNFRRALMNIILMGLPGAGKGTQASEIVKKFPIPHISTGDMFRKAIKEETELGKEAKSYMDRGELVPDEVTVGIVKERISEDDAKKGFLLDGFPRTIEQAEALNNILSELDRNIDAVINIEVPEEELMNRLTGRRICESCGTTYHLVFNPPKVEGICDIDGGKLYQREDDNPETVANRLSVNIKQSKPILDFYDQKGVLKNIVGSKDISDVTKDVIDILDHL

SEQ ID NO: 539 - DNA, 35 bp, Staphylococcus aureus
gcggcggcccatatggtggtagataattttaggag

SEQ ID NO: 540 - DNA, 34 bp, Staphylococcus aureus
gcgcggatcccaaatgatctaaaatatcaatgac

SEQ ID NO: 541 - protein, 15 aa, Staphylococcus aureus
ELVPDEVTVGIVKER

SEQ ID NO: 542 - protein, 16 aa, Staphylococcus aureus
ICESCGTTYHLVFNPP

SEQ ID NO: 543 - protein, 12 aa, Staphylococcus aureus
ISDVTKDVIDIL

SEQ ID NO: 544 - DNA, 1302 bp, Helicobacter pylori
atgctttctgtcatcatactggccgctggtaaaggcactcgcatgcgttctagcctgcctaaaactttacacaccatttgtggggagcctatgttgttttacattttagaaacggctttttcaatcagcgatgatgtgcatcttatcttacaccaccaacaagaacgcattaaagaagcggtgttggagcgttttaagggcgtcatttttcacactcaaattgtggaaaaatattcagggacaggtggggctatcatgcaaaaagataaaacgcctatttctacgaaacatgagcgggttttgattttgaatgcggacatgcctttaatcactaaagacgctctcgcccccttattagaaagcaagaataacgctataggcttactccatttagctgaccctaaaggttatgggcgcgttgttttagaaaaccatcaggttaaaaagattgtagaagaaaaggacgctaatgatgaagaaaaagaaattaaaagcgtgaatgctggcgtgtatgggtttgaaagggattttttagaaaaatacttacccaagctccatgaccaaaacgcccaaaaagaatactacctcacggatttaatcgctctagggatcaatgaaaacgaaacaattgacgctattttcttaaaagaagagtgttttttaggggtgaatagccaaacagaaagggcgaaagctgaagaaatcatgctagaaagactgcgcaaaaacgccatggacttgggggtagtgatgcaattgcctaatagcatttatttagaaaaaggcgtgagttttaagggggagtgcgttttagagcaaggggtgcgtttgattgggaattgtttgatagaaaacgcgcatattaaggcttatagcgtgatagaagagagccagattgttaatagcagtgtggggccgtttgcccatgcgcgccctaaaagcgtgatttgtaatagccatgtggggaattttgtagagactaaaaacgctaaacttcaaggcactaaagcagggcatttgagctatttaggggattgtgagatagggaaaaacacaaatgtaggggctggcgtgatcacttgcaattacgatggtaaaaagaaacaccaaacaatcatcggtgaaaatgtctttatagggagcgatagccagctagtcgcccccataaatatcggctctaatgtcttaatcggcagcggcaccactatcactaaagacattcctagcggttcgttgagcctttcacgcgcccctcaaaccaacattgaaaacgggtattttaagttttttaagaaaccttaa

SEQ ID NO: 545 - protein, 433 aa, Helicobacter pylori
MLSVIILAAGKGTRMRSSLPKTLHTICGEPMLFYILETAFSISDDVHLILHHQQERIKEAVLERFKGVIFHTQIVEKYSGTGGAIMQKDKTPISTKHERVLILNADMPLITKDALAPLLESKNNAIGLLHLADPKGYGRVVLENHQVKKIVEEKDANDEEKEIKSVNAGVYGFERDFLEKYLPKLHDQNAQKEYYLTDLIALGINENETIDAIFLKEECFLGVNSQTERAKAEEIMLERLRKNAMDLGVVMQLPNSIYLEKGVSFKGECVLEQGVRLIGNCLIENAHIKAYSVIEESQIVNSSVGPFAHARPKSVICNSHVGNFVETKNAKLQGTKAGHLSYLGDCEIGKNTNVGAGVITCNYDGKKKHQTIIGENVFIGSDSQLVAPINIGSNVLIGSGTTITKDIPSGSLSLSRAPQTNIENGYFKFFKKP

SEQ ID NO: 546 - DNA, 1302 bp, Helicobacter pylori
atgctttctgtcatcatactggccgctggtaaaggcactcgcatgcgttctagcctgcctaagactttacacacgatttgcggggagcctatgctgttttacattttagaagtggctttttcaatcagtaatgatgtgcatcttatcttacaccaccaacaagaacgcgttaaagaagcggtgttgaagcgttttaagggcgtaatcttccacactcaaatcgtggaaaaatattcagggacaggtggggctatcatgcaagaagataagacgcctatccctacaaaacatgagcgggttttgattttgaatgcggacatgcccttaatcactaaagacgctctcgcccccttattagaaagcaagaataacgccataggcttactgcatttagctgatcctaaaggttatgggcgcgttgttttagaaaaccatcatgttaaaaagattgtagaagaaaaggacgctaatgatgaagaaaaaaccattaaaagcgtgaacgctggcgtgtatttttttgaaagaaagtttttagaaaaatacttgtccaagctccatgaccaaaacgcccaaaaagaatactacctcacggatttaatcgctctaggaatcaataaaaacgaaacaattgacgctatttttttagaagaagagtgttttttaggggtgaatagccaaacagaaagggcgaaggctgaagaaatcatgctagaaagactgcgcaaaaacgccatggacttgggggtagtgatgcaattgcctaatagcatttatttagaaaaaggcgtgagttttaagggggagtgcgttttagagcagggggtgcgtttgattgggaattgtttgatagaaaacgcgcatattaaggcttatagcgtgatagaagagagccagattgttaatagcagtgtggggccgtttgcccatgcgcgccctaaaagcgtgatttgtaatagccatgtggggaattttgtagaaactaaaaacgccaaacttcaaggcgctaaagcggggcatttgagctatttaggggattgtgaaatagggaaaaacacaaatgtaggggctggcgtgatcacttgcaattatgatggtaaaaagaaacaccaaacaatcatcggtgaaaatgtctttatagggagcgatagccaactagtcgcccccataaatatcggctctaatgtcttaatcggcagcggcaccaccatcactaaagacattcctagcggttcgttgagcctttcacgcgcccctcaaaccaacattgaaaacgggtattttaagttttttaagaaaccttaa

SEQ ID NO: 547 - protein, 433 aa, Helicobacter pylori
MLSVIILAAGKGTRMRSSLPKTLHTICGEPMLFYILEVAFSISNDVHLILHHQQERVKEAVLKRFKGVIFHTQIVEKYSGTGGAIMQEDKTPIPTKHERVLILNADMPLITKDALAPLLESKNNAIGLLHLADPKGYGRVVLENHHVKKIVEEKDANDEEKTIKSVNAGVYFFERKFLEKYLSKLHDQNAQKEYYLTDLIALGINKNETIDAIFLEEECFLGVNSQTERAKAEEIMLERLRKNAMDLGVVMQLPNSIYLEKGVSFKGECVLEQGVRLIGNCLIENAHIKAYSVIEESQIVNSSVGPFAHARPKSVICNSHVGNFVETKNAKLQGAKAGHLSYLGDCEIGKNTNVGAGVITCNYDGKKKHQTIIGENVFIGSDSQLVAPINIGSNVLIGSGTTITKDIPSGSLSLSRAPQTNIENGYFKFFKKP

SEQ ID NO: 548 - DNA, 33 bp, Helicobacter pylori
gcggcggcccatatgctttctgtcatcatactg

SEQ ID NO: 549 - DNA, 35 bp, Helicobacter pylori
gcgcggatccaggtttcttaaaaaacttaaaatac

SEQ ID NO: 550 - protein, 36 aa, Helicobacter pylori
LPKTLHTICGEPMLFYILETAFSISDDVHLILHHQQ

SEQ ID NO: 551 - protein, 6 aa, Helicobacter pylori
VIILAA

SEQ ID NO: 552 - protein, 37 aa, Helicobacter pylori
IKAYSVIEESQIVNSSVGPFAHARPKSVICNSHVGNF

SEQ ID NO: 553 - DNA, 900 bp, Eschericia coli
atggactttccgcagcaactcgaagcctgcgttaagcaggccaaccaggcgctgagccgttttatcgccccactgccctttcagaacactcccgtggtcgaaaccatgcagtatggcgcattattaggtggtaagcgcctgcgacctttcctggtttatgccaccggtcatatgttcggcgttagcacaaacacgctggacgcacccgctgccgccgttgagtgtatccacgcttactcattaattcatgatgatttaccggcaatggatgatgacgatctgcgtcgcggtttgccaacctgccatgtgaagtttggcgaagcaaacgcgattctcgctggcgacgctttacaaacgctggcgttctcgattttaagcgatgccgatatgccggaagtgtcggaccgcgacagaatttcgatgatttctgaactggcgagcgccagtggtattgccggaatgtgcggtggtcaggcattagatttagacgcggaaggcaaacacgtacctctggacgcgcttgagcgtattcatcgtcataaaaccggcgcattgattcgcgccgccgttcgccttggtgcattaagcgccggagataaaggacgtcgtgctctgccggtactcgacaagtatgcagagagcatcggccttgccttccaggttcaggatgacatcctggatgtggtgggagatactgcaacgttgggaaaacgccagggtgccgaccagcaacttggtaaaagtacctaccctgcacttctgggtcttgagcaagcccggaagaaagcccgggatctgatcgacgatgcccgtcagtcgctgaaacaactggctgaacagtcactcgatacctcggcactggaagcgctagcggactacatcatccagcgtaataaataa

SEQ ID NO: 554 - protein, 299 aa, Eschericia coli
MDFPQQLEACVKQANQALSRFIAPLPFQNTPVVETMQYGALLGGKRLRPFLVYATGHMFGVSTNTLDAPAAAVECIHAYSLIHDDLPAMDDDDLRRGLPTCHVKFGEANAILAGDALQTLAFSILSDADMPEVSDRDRISMISELASASGIAGMCGGQALDLDAEGKHVPLDALERIHRHKTGALIRAAVRLGALSAGDKGRRALPVLDKYAESIGLAFQVQDDILDVVGDTATLGKRQGADQQLGKSTYPALLGLEQARKKARDLIDDARQSLKQLAEQSLDTSALEALADYIIQRNK

SEQ ID NO: 555 - DNA, 900 bp, Eschericia coli
atggactttccgcagcaactcgaagcctgcgttaagcaggccaaccaggcgctgagccgttttatcgccccactgcccttccagaacactcccgtggtcgaaaccatgcagtatggcgcattattaggtggtaagcgcctgcgacctttcctggtttatgccaccggtcatatgttcggcgttagcataaacacgctggacgcacccgctgccgccgttgagtgtatccacgcttactcattaattcatgatgatttaccggcaatggatgatgacgatctgcgtcgcggtttgccaacctgccatgtgaagtttggcgaagcaaacgcgattctcgctggcgacgctttacaaacgctggcgttctcgattttaagcgatgccgatatgccggaagtgtcggaccgcgacagaatttcgatgatttctgaactggcgagcgccagtggtattgccggaatgtgcggtggtcaggcattagatttagacgcggaaggcaaacacgtacctctggacgcgcttgagcgtattcatcgtcataaaaccggcgcattgattcgcgccgccgttcgccttggtgcattaagcgccggagataaaggacgtcgtgctctgccggtactcgacaagtatgcagagagcatcggccttgccttccaggttcaggatgacatcctggatgtggtgggagatactgcaacgttgggaaaacgccagggtgccgaccagcaacttggtaaaagtacctaccctgcacttctgggtcttgagcaagcccggaagaaagcccgggatctgatcgacgatgcccgtcagtcgctgaaacaactggctgaacagtcactcgatacctcggcactggaagcgctagcggactacatcatccagcgtaataaataa

SEQ ID NO: 556 - protein, 299 aa, Eschericia coli
MDFPQQLEACVKQANQALSRFIAPLPFQNTPVVETMQYGALLGGKRLRPFLVYATGHMFGVSINTLDAPAAAVECIHAYSLIHDDLPAMDDDDLRRGLPTCHVKFGEANAILAGDALQTLAFSILSDADMPEVSDRDRISMISELASASGIAGMCGGQALDLDAEGKHVPLDALERIHRHKTGALIRAAVRLGALSAGDKGRRALPVLDKYAESIGLAFQVQDDILDVVGDTATLGKRQGADQQLGKSTYPALLGLEQARKKARDLIDDARQSLKQLAEQSLDTSALEALADYIIQRNK

SEQ ID NO: 557 - DNA, 30 bp, Eschericia coli
cgcggggtaccatggactttccgcagcaac

SEQ ID NO: 558 - DNA, 32 bp, Eschericia coli
gcgcggatcctttattacgctggatgatgtag

SEQ ID NO: 559 - protein, 19 aa, Eschericia coli
APAAAVECIHAYSLIHDDL

SEQ ID NO: 560 - protein, 9 aa, Eschericia coli
RPFLVYATG

SEQ ID NO: 561 - protein, 10 aa, Eschericia coli
RGLPTCHVKF

SEQ ID NO: 562 - DNA, 828 bp, Helicobacter pylori
atgggatttttaaaaggtaaaaaagggcttattgtaggggtggcgaacaataaatccatcgcttatgggatcgctcaatcttgtttcaatcaaggggctactttggctttcacttatttgaatgagagtttagaaaagcgcgtaaggcctatcgcgcaggaattgaatagcccctatgtgtatgaattggatgtgagcaaagaagagcatttcaagtcgctatacaatagcgttaaaaaggatttaggctcattggattttattgttcatagcgtggcctttgcccctaaagaggctttagaggggagcttgttggaaacttctaaaagcgcgtttaacaccgctatggaaatttctgtttattctttaatagagctgacaaacaccctaaaacctttattgaataacggagcgtctgttttgactctaagctatttgggtagcaccaaatacatggcgcattacaatgtgatggggttggctaaagcggccctagagagtgcggtgcgttatttagcggtggatttaggcaaacaccatataagagtgaatgccctatcggccgggcctattaggacgctcgcttctagcgggatcgctgattttagaatgattttaaaatggaatgaaatcaacgcccctttaagaaaaaatgtgagtttagaagaagtgggcaatgccgggatgtatttgctctctagtttgtctagcggggtgagtggggaagtgcattttgtggatgctggctatcatgttatgggcatgggggctgtggaagaaaaagataataaagctacgctactgtgggatttgcataaagaacaataa

SEQ ID NO: 563 - protein, 275 aa, Helicobacter pylori
MGFLKGKKGLIVGVANNKSIAYGIAQSCFNQGATLAFTYLNESLEKRVRPIAQELNSPYVYELDVSKEEHFKSLYNSVKKDLGSLDFIVHSVAFAPKEALEGSLLETSKSAFNTAMEISVYSLIELTNTLKPLLNNGASVLTLSYLGSTKYMAHYNVMGLAKAALESAVRYLAVDLGKHHIRVNALSAGPIRTLASSGIADFRMILKWNEINAPLRKNVSLEEVGNAGMYLLSSLSSGVSGEVHFVDAGYHVMGMGAVEEKDNKATLLWDLHKEQ

SEQ ID NO: 564 - DNA, 828 bp, Helicobacter pylori
atgggatttttaaaaggtaaaaaagggcttattgtaggggtggcaaacaataaatccatcgcttatgggatcgctcaatcttgtttcaatcaaggggctactttagctttcacttatttgaatgagagcttagaaaagcgcgtgaggcctatcgcgcaggaattgaacagtccctatgtgtatgaattggatgtgagcaaagaagagcatttcaaggtgctatacaatagcgttaaaaaggatttaggctcattggattttatcgttcatagcgtggcctttgcccctaaagaggctttaaagggaagcttgttggaaacttctaaaagcgcgtttaacaccgctatggaaatttctgtttattctttaatagagctgacaaacaccctaaaacctttattgaataacggagcgtctgttttgactctaagctatttgggtagcaccaaatacatggcgcattacaatgtgatggggttggctaaagcggccctagagagtgcggtgcgttatttagcggtggatttaggcaaacaccatataagagtgaatgccctatcggccgggcctattaggacgctcgcttctagcgggatcgctgattttagaatgattttaaaatggaatgaaatcaacgcccctttaagaaaaaatgtgagtttagaagaagtgggcaatgccgggatgtatttgctctctagtttgtctagcggggtgagtggggaagtgcattttgtggatgctggctatcatgttatgggcatgggggctgtggaagaaaaagataataaagctacgctactgtgggatttgcataaagaacaataa

SEQ ID NO: 565 - protein, 275 aa, Helicobacter pylori
MGFLKGKKGLIVGVANNKSIAYGIAQSCFNQGATLAFTYLNESLEKRVRPIAQELNSPYVYELDVSKEEHFKVLYNSVKKDLGSLDFIVHSVAFAPKEALKGSLLETSKSAFNTAMEISVYSLIELTNTLKPLLNNGASVLTLSYLGSTKYMAHYNVMGLAKAALESAVRYLAVDLGKHHIRVNALSAGPIRTLASSGIADFRMILKWNEINAPLRKNVSLEEVGNAGMYLLSSLSSGVSGEVHFVDAGYHVMGMGAVEEKDNKATLLWDLHKEQ

SEQ ID NO: 566 - DNA, 37 bp, Helicobacter pylori
gcggcggcccatatgggatttttaaaaggtaaaaaag

SEQ ID NO: 567 - DNA, 32 bp, Helicobacter pylori
gcgcggatccttgttctttatgcaaatcccac

SEQ ID NO: 568 - protein, 14 aa, Helicobacter pylori
NNGASVLTLSYLGS

SEQ ID NO: 569 - protein, 28 aa, Helicobacter pylori
FKSLYNSVKKDLGSLDFIVHSVAFAPKE

SEQ ID NO: 570 - protein, 39 aa, Helicobacter pylori
YMAHYNVMGLAKAALESAVRYLAVDLGKHHIRVNALSAG

SEQ ID NO: 571 - DNA, 1026 bp, Helicobacter pylori
atggaagtttcacgcaagaaaatttacaaccccaattctacagaaagtgtgaatgaaagaaagatttttgggggcaatcctacaagcatgtttgatttgaataagatcaagtatcaatgggcggatcatttgtggaaaacgatgctcgctaacacctggtttgctgaagaagtgagcatgaatgatgacaaaagggattatttgaaattaagcgcagaggaaaagatcggttatgacagagctttagcgcaactcatttttatggacagcttgcaagcgaataatttaattgacaatatcaatcccttcatcaccagccccgaaatcaatttgtgtttggtgcgtcaagcttatgaagaagccctacacagccatgcgtatgcggtgatggtagaaagcataagtgcgaatactgaagagatttatgacatgtggcgtaacgatatgcaattaaaaagcaagaacgactatatcgcgcaagtgtatatggaattagccaaaaaccccacagaagaaaacattctcaaagcgctttttgctaaccagattttagaggggatttatttttatagcgggtttagctatttttacactttggctaggagcggtaaaatgctaggatcggcacaaatgattcgttttatccaaagagatgaggtaacgcatttgattttgttccaaaacatgatcaacgctttaaggaatgaaagagcggatctcttcacgccgcaattgattaatgaagtcataggaatgtttaaaaaagcggtagaaattgaagctttgtggggggattatatcacgcaaggcaagattttagggctcacttcaagcttgattgagcaatacatccagtttttagcggatagccgtttgagtaaggtgggcatcgctaaagtttatggcgtccaacaccccattaaatgggtagagagcttttcaagtttcaatgagcagcgctctaatttctttgaggctagggtgagcaattacgctaaagggagcgtgagttttgatgatttttaa

SEQ ID NO: 572 - protein, 341 aa, Helicobacter pylori
MEVSRKKIYNPNSTESVNERKIFGGNPTSMFDLNKIKYQWADHLWKTMLANTWFAEEVSMNDDKRDYLKLSAEEKIGYDRALAQLIFMDSLQANNLIDNINPFITSPEINLCLVRQAYEEALHSHAYAVMVESISANTEEIYDMWRNDMQLKSKNDYIAQVYMELAKNPTEENILKALFANQILEGIYFYSGFSYFYTLARSGKMLGSAQMIRFIQRDEVTHLILFQNMINALRNERADLFTPQLINEVIGMFKKAVEIEALWGDYITQGKILGLTSSLIEQYIQFLADSRLSKVGIAKVYGVQHPIKWVESFSSFNEQRSNFFEARVSNYAKGSVSFDDF

SEQ ID NO: 573 - DNA, 1026 bp, Helicobacter pylori
atggaagtttcacgcaagaaaatttacaaccccaattctacagaaagtgtgaatgaaagaaagatttttgggggtaatcctacaagcatgtttgatttgaataagatcaagtatcaatgggcggatcatttgtggaaaacgatgctcgctaacacttggtttgctgaagaagtgagcatgaatgatgacaaaagggattatttgaaattgagtgcagaagaaaagatcggctatgacagagctttagcgcaactcatttttatggacagcttgcaaacgaataatttaattgacaatatcaatcccttcatcaccagccccgaaatcaatttgtgtttggtgcgtcaagcttatgaagaagccttacacagccatgcgtatgcggtgatggtagaaagcattagcgcgaatactgaagagatttatgacatgtggcgtaacgatatgcaattaaaaagtaagaatgactatatcgcgcaagtgtatatggaattagccaaaaaccccacagaagaaaacattctcaaagcgctttttgcgaaccagattttagaggggatttatttttatagcgggtttagctatttttacactttggctaggagcggtaaaatgctaggatcagcgcaaatgattcgttttatccaaagagatgaggtaacgcatttgattttattccaaaacatgatcaacgctttaaggaatgaaagagcggatctcttcacgccgcaattgattaatgaagtcataggaatgtttaaaaaagcggtagaaattgaagctttgtggggggattatatcacgcaaggcaagattttagggctcacttccagcttgattgagcaatacatccagtttttagcggatagcagtttgagtaaggtgggtatcgctaaagtttatggcgtccaacaccccattaaatgggtagagagcttttcaagtttcaatgagcaacgctctaatttctttgaggctagggtgagcaattacgctaaagggagcgtgagttttgatgatttttaa

SEQ ID NO: 574 - protein, 341 aa, Helicobacter pylori
MEVSRKKIYNPNSTESVNERKIFGGNPTSMFDLNKIKYQWADHLWKTMLANTWFAEEVSMNDDKRDYLKLSAEEKIGYDRALAQLIFMDSLQTNNLIDNINPFITSPEINLCLVRQAYEEALHSHAYAVMVESISANTEEIYDMWRNDMQLKSKNDYIAQVYMELAKNPTEENILKALFANQILEGIYFYSGFSYFYTLARSGKMLGSAQMIRFIQRDEVTHLILFQNMINALRNERADLFTPQLINEVIGMFKKAVEIEALWGDYITQGKILGLTSSLIEQYIQFLADSSLSKVGIAKVYGVQHPIKWVESFSSFNEQRSNFFEARVSNYAKGSVSFDDF

SEQ ID NO: 575 - DNA, 39 bp, Helicobacter pylori
gcggcggcccatatggaagtttcacgcaagaaaatttac

SEQ ID NO: 576 - DNA, 32 bp, Helicobacter pylori
gcgcggatccaaaatcatcaaaactcacgctc

SEQ ID NO: 577 - protein, 10 aa, Helicobacter pylori
EINLCLVRQA

SEQ ID NO: 578 - protein, 11 aa, Helicobacter pylori
RDEVTHLILFQ

SEQ ID NO: 579 - protein, 16 aa, Helicobacter pylori
EEALHSHAYAVMVESI

SEQ ID NO: 580 - protein, 8 aa
IAIELHLK

SEQ ID NO: 581 - protein, 9 aa, Staphylococcus aureus
RLIVGGLEK

SEQ ID NO: 582 - protein, 9 aa, Staphylococcus aureus
IAIELHLKR

SEQ ID NO: 583 - protein, 10 aa, Staphylococcus aureus
VFRNEGVSTR

SEQ ID NO: 584 - protein, 10 aa, Staphylococcus aureus
GRFEAQLVEK

SEQ ID NO: 585 - protein, 10 aa, Staphylococcus aureus
FHGLQDIEQR

SEQ ID NO: 586 - protein, 11 aa, Staphylococcus aureus
EATGVDFYEVK

SEQ ID NO: 587 - protein, 12 aa, Staphylococcus aureus
LVMLLTDSPSIR

SEQ ID NO: 588 - protein, 12 aa, Staphylococcus aureus
YLDLITNEDSTR

SEQ ID NO: 589 - protein, 12 aa, Staphylococcus aureus
FTDRFELFIVGR

SEQ ID NO: 590 - protein, 12 aa, Staphylococcus aureus
YGHILNEFFEQK

SEQ ID NO: 591 - protein, 13 aa, Staphylococcus aureus
VMSEEMNDQMLVR

SEQ ID NO: 592 - protein, 13 aa, Staphylococcus aureus
KDQVGDDEFDLWK

SEQ ID NO: 593 - protein, 16 aa, Staphylococcus aureus
NADLGDIVGVEGVMFK

SEQ ID NO: 594 - protein, 14 aa, Staphylococcus aureus
QRYLDLITNEDSTR

SEQ ID NO: 595 - protein, 23 aa, Staphylococcus aureus
VEETLIQPTFIYGHPTEISPLAK

SEQ ID NO: 596 - protein, 12 aa, Helicobacter pylori
QKVPFEPLVQNK

SEQ ID NO: 597 - protein, 14 aa, Helicobacter pylori
IALMDTPQGTIWEK

SEQ ID NO: 598 - protein, 16 aa, Helicobacter pylori
DYGSLSVHNSSIEFGR

SEQ ID NO: 599 - protein, 20 aa, Helicobacter pylori
ANIYVCGPTVYDDAHLGHAR

SEQ ID NO: 600 - protein, 21 aa, Helicobacter pylori
ALSVLESMLSSTNEKLDQNPK

SEQ ID NO: 601 - protein, 8 aa, Pseudomonas aeruginosa
VLAGLNRR

SEQ ID NO: 602 - protein, 12 aa, Pseudomonas aeruginosa
GVTELVECGPGK

SEQ ID NO: 603 - protein, 11 aa, Pseudomonas aeruginosa
DLLAQLYSPVR

SEQ ID NO: 604 - protein, 21 aa, Pseudomonas aeruginosa
DLLAQYSPVRWVESIQLLAEK

SEQ ID NO: 605 - protein, 12 aa, Pseudomonas aeruginosa
RDLLAQLYSPVR

SEQ ID NO: 606 - protein, 14 aa, Pseudomonas aeruginosa
TQPAILTVSIALWR

SEQ ID NO: 607 - protein, 8 aa, Helicobacter pylori
LLDALKER

SEQ ID NO: 608 - protein, 9 aa, Helicobacter pylori
AGSFMQPLR

SEQ ID NO: 609 - protein, 9 aa, Helicobacter pylori
EALVNFLAR

SEQ ID NO: 610 - protein, 10 aa, Helicobacter pylori
TAIFNYLFAR

SEQ ID NO: 611 - protein, 12 aa, Helicobacter pylori
GTPPKGIEPVVR

SEQ ID NO: 612 - protein, 10 aa, Helicobacter pylori
LNWLNAHYLK

SEQ ID NO: 613 - protein, 13 aa, Helicobacter pylori
EALFILGKTESVK

SEQ ID NO: 614 - protein, 12 aa, Helicobacter pylori
FFLRIEDTDLSR

SEQ ID NO: 615 - protein, 15 aa, Helicobacter pylori
FAPSPTGYLHIGGLR

SEQ ID NO: 616 - protein, 14 aa, Helicobacter pylori
IDEVLIAPVEYEEK

SEQ ID NO: 617 - protein, 17 aa, Helicobacter pylori
IPNFFHVPMILNEEGQK

SEQ ID NO: 618 - protein, 17 aa, Helicobacter pylori
RHGATNVMDYQEMGYLK

SEQ ID NO: 619 - protein, 19 aa, Helicobacter pylori
ELALKIDEVLIAPVEYEEK

SEQ ID NO: 620 - protein, 20 aa, Helicobacter pylori
LLKPFSFSDLSHLNPTQLDR

SEQ ID NO: 621 - protein, 8 aa, Helicobacter pylori
SEVDFLMK

SEQ ID NO: 622 - protein, 10 aa, Helicobacter pylori
AIGDLEGFSK

SEQ ID NO: 623 - protein, 11 aa, Helicobacter pylori
DTILQLENDTR

SEQ ID NO: 624 - protein, 11 aa, Helicobacter pylori
DLENIISDFYK

SEQ ID NO: 625 - protein, 13 aa, Helicobacter pylori
DFTQVLALNYGSK

SEQ ID NO: 626 - protein, 12 aa, Helicobacter pylori
DLENIISDFYKR

SEQ ID NO: 627 - protein, 7 aa, Eschericia coli
IFNTLTR

SEQ ID NO: 628 - protein, 9 aa, Eschericia coli
DWAAADAAR

SEQ ID NO: 629 - protein, 8 aa, Eschericia coli
YYDAETVR

SEQ ID NO: 630 - protein, 9 aa, Eschericia coli
SLGNFFTVR

SEQ ID NO: 631 - protein, 10 aa, Eschericia coli
TFVAFDVVAR

SEQ ID NO: 632 - protein, 11 aa, Eschericia coli
AKDWAAADAAR

SEQ ID NO: 633 - protein, 9 aa, Eschericia coli
NPMDFVLWK

SEQ ID NO: 634 - protein, 9 aa, Eschericia coli
YFLMSGHYR

SEQ ID NO: 635 - protein, 11 aa, Eschericia coli
QDLDQLQAGAR

SEQ ID NO: 636 - protein, 13 aa, Eschericia coli
TVAPAGGEAFEAR

SEQ ID NO: 637 - protein, 10 aa, Eschericia coli
RNPMDFVLWK

SEQ ID NO: 638 - protein, 11 aa, Eschericia coli
SQLNYSEENLK

SEQ ID NO: 639 - protein, 14 aa, Eschericia coli
ANENGESFVAMVDR

SEQ ID NO: 640 - protein, 15 aa, Eschericia coli
AEDMAAANAMASHLR

SEQ ID NO: 641 - protein, 15 aa, Eschericia coli
RANENGESFVAMVDR

SEQ ID NO: 642 - protein, 18 aa, Eschericia coli
ATHHIAEIIELTEQLIAK

SEQ ID NO: 643 - protein, 19 aa, Eschericia coli
LNEMGIVLEDGPQGTTWRR

SEQ ID NO: 644 - protein, 26 aa, Eschericia coli
GHAYVADNGDVMFDVPTDPTYGVLSR

SEQ ID NO: 645 - protein, 27 aa, Eschericia coli
EGEPSWPSPWGAGRPGWHIECSAMNCK

SEQ ID NO: 646 - protein, 8 aa, Helicobacter pylori
NDLENALR

SEQ ID NO: 647 - protein, 8 aa, Helicobacter pylori
RALLEILK

SEQ ID NO: 648 - protein, 9 aa, Helicobacter pylori
FLDIISCLK

SEQ ID NO: 649 - protein, 9 aa, Helicobacter pylori
YLQAFLDKK

SEQ ID NO: 650 - protein, 9 aa, Helicobacter pylori
RLSYTQLEK

SEQ ID NO: 651 - protein, 9 aa, Helicobacter pylori
LFYENFSFK

SEQ ID NO: 652 - protein, 11 aa, Helicobacter pylori
IAPVIEQTSHK

SEQ ID NO: 653 - protein, 10 aa, Helicobacter pylori
KFLDIISCLK

SEQ ID NO: 654 - protein, 12 aa, Helicobacter pylori
HQTLSVVGTDTK

SEQ ID NO: 655 - protein, 11 aa, Helicobacter pylori
LIDGNYPDYQK

SEQ ID NO: 656 - protein, 12 aa, Helicobacter pylori
KIAPVIEQTSHK

SEQ ID NO: 657 - protein, 12 aa, Helicobacter pylori
IAPVIEQTSHKR

SEQ ID NO: 658 - protein, 12 aa, Helicobacter pylori
ELAGILMQFDQK

SEQ ID NO: 659 - protein, 13 aa, Helicobacter pylori
HQTLSVVGTDTKR

SEQ ID NO: 660 - protein, 13 aa, Helicobacter pylori
ISVSKNDLENALR

SEQ ID NO: 661 - protein, 13 aa, Helicobacter pylori
RELAGILMQFDQK

SEQ ID NO: 662 - protein, 15 aa, Helicobacter pylori
DASSIASHIHLEVIK

SEQ ID NO: 663 - protein, 18 aa, Helicobacter pylori
LPMFDADEFPEFPVIDPK

SEQ ID NO: 664 - protein, 18 aa, Helicobacter pylori
FLDIISCLKDSNIILETK

SEQ ID NO: 665 - protein, 9 aa, Helicobacter pylori
GFCGHGIGK

SEQ ID NO: 666 - protein, 11 aa, Helicobacter pylori
ESLMHAINSIR

SEQ ID NO: 667 - protein, 14 aa, Helicobacter pylori
AGELTAQALALLER

SEQ ID NO: 668 - protein, 15 aa, Helicobacter pylori
KAGELTAQALALLER

SEQ ID NO: 669 - protein, 14 aa, Helicobacter pylori
KPHEEPEIPNYLEK

SEQ ID NO: 670 - protein, 20 aa, Helicobacter pylori
EVRPGVSLLELDKMAEDFIK

SEQ ID NO: 671 - protein, 29 aa, Helicobacter pylori
ILADKWSVVSVDGLNTSHHEHTIAIVGNK

SEQ ID NO: 672 - protein, 8 aa, Helicobacter pylori
AILGSFER

SEQ ID NO: 673 - protein, 9 aa, Helicobacter pylori
SGVLHGLLR

SEQ ID NO: 674 - protein, 9 aa, Helicobacter pylori
IYGIAFATK

SEQ ID NO: 675 - protein, 9 aa, Helicobacter pylori
FYEYGVVHR

SEQ ID NO: 676 - protein, 10 aa, Helicobacter pylori
SIGDDKVWEK

SEQ ID NO: 677 - protein, 12 aa, Helicobacter pylori
IDEGGGAFYGPK

SEQ ID NO: 678 - protein, 10 aa, Helicobacter pylori
VYQSALHSYR

SEQ ID NO: 679 - protein, 12 aa, Helicobacter pylori
GYEPVKGPEILK

SEQ ID NO: 680 - protein, 7 aa, Streptococcus pneumoniae
FHSEWGK

SEQ ID NO: 681 - protein, 8 aa, Streptococcus pneumoniae
QFGAEILR

SEQ ID NO: 682 - protein, 8 aa, Streptococcus pneumoniae
ISKDIIVR

SEQ ID NO: 683 - protein, 9 aa, Streptococcus pneumoniae
ALEEARNAK

SEQ ID NO: 684 - protein, 9 aa, Streptococcus pneumoniae
LKDTLNLGK

SEQ ID NO: 685 - protein, 8 aa, Streptococcus pneumoniae
TKKPIIWR

SEQ ID NO: 686 - protein, 9 aa, Streptococcus pneumoniae
RIDPTTAER

SEQ ID NO: 687 - protein, 8 aa, Streptococcus pneumoniae
VRLYNMIR

SEQ ID NO: 688 - protein, 9 aa, Streptococcus pneumoniae
DRGDWVISR

SEQ ID NO: 689 - protein, 9 aa, Streptococcus pneumoniae
SVDKYMTIR

SEQ ID NO: 690 - protein, 9 aa, Streptococcus pneumoniae
VKFHSEWGK

SEQ ID NO: 691 - protein, 9 aa, Streptococcus pneumoniae
EMDLVEYLK

SEQ ID NO: 692 - protein, 11 aa, Streptococcus pneumoniae
AVPQWFASVSK

SEQ ID NO: 693 - protein, 12 aa, Streptococcus pneumoniae
QILSQGFALDGK

SEQ ID NO: 694 - protein, 11 aa, Streptococcus pneumoniae
EYALSQVDKQR

SEQ ID NO: 695 - protein, 12 aa, Streptococcus pneumoniae
AGLPTKEPVWQK

SEQ ID NO: 696 - protein, 11 aa, Streptococcus pneumoniae
YMTIRFNQLVK

SEQ ID NO: 697 - protein, 11 aa, Streptococcus pneumoniae
FRQEILDEIEK

SEQ ID NO: 698 - protein, 13 aa, Streptococcus pneumoniae
LWVTSVDSSNDVR

SEQ ID NO: 699 - protein, 12 aa, Streptococcus pneumoniae
QMQTVFYDILVK

SEQ ID NO: 700 - protein, 13 aa, Streptococcus pneumoniae
NAGPEFEGQFYEK

SEQ ID NO: 701 - protein, 13 aa, Streptococcus pneumoniae
DTLNLGKTEFPMR

SEQ ID NO: 702 - protein, 13 aa, Streptococcus pneumoniae
VFGEMANKGYIYR

SEQ ID NO: 703 - protein, 13 aa, Streptococcus pneumoniae
FGWADVQVLETYR

SEQ ID NO: 704 - protein, 13 aa, Streptococcus pneumoniae
DAYADFEFLTIYK

SEQ ID NO: 705 - protein, 13 aa, Streptococcus pneumoniae
RQMQTVFYDILVK

SEQ ID NO: 706 - protein, 18 aa, Streptococcus pneumoniae
DLLPEGFTHPGSPNGEFK

SEQ ID NO: 707 - protein, 20 aa, Streptococcus pneumoniae
GLTVGADIDYVLVQPAGEAR

SEQ ID NO: 708 - protein, 19 aa, Streptococcus pneumoniae
DLLPEGFTHPGSPNGEFKK

SEQ ID NO: 709 - protein, 20 aa, Streptococcus pneumoniae
GWFNSSLITSVANHGVAPYK

SEQ ID NO: 710 - protein, 26 aa, Streptococcus pneumoniae
SMSGFYAPFIPGWDTHGLPIEQVLSK

SEQ ID NO: 711 - protein, 8 aa, Streptococcus pneumoniae
FRQNLLGK

SEQ ID NO: 712 - protein, 10 aa, Streptococcus pneumoniae
IIPAGTGMAR

SEQ ID NO: 713 - protein, 8 aa, Streptococcus pneumoniae
VQEIFEAR

SEQ ID NO: 714 - protein, 8 aa, Streptococcus pneumoniae
MYQCGVPR

SEQ ID NO: 715 - protein, 8 aa, Streptococcus pneumoniae
KPETINYR

SEQ ID NO: 716 - protein, 9 aa, Streptococcus pneumoniae
NGYVHLHSR

SEQ ID NO: 717 - protein, 9 aa, Streptococcus pneumoniae
YNAVTAEWR

SEQ ID NO: 718 - protein, 10 aa, Streptococcus pneumoniae
MGLTLDMSPR

SEQ ID NO: 719 - protein, 10 aa, Streptococcus pneumoniae
EYGYGSFVAK

SEQ ID NO: 720 - protein, 9 aa, Streptococcus pneumoniae
EMIESLEER

SEQ ID NO: 721 - protein, 10 aa, Streptococcus pneumoniae
EIAELKEELK

SEQ ID NO: 722 - protein, 11 aa, Streptococcus pneumoniae
MRVEVGGQVAR

SEQ ID NO: 723 - protein, 10 aa, Streptococcus pneumoniae
DRDEAVMAYR

SEQ ID NO: 724 - protein, 10 aa, Streptococcus pneumoniae
RLDVLDAFYK

SEQ ID NO: 725 - protein, 10 aa, Streptococcus pneumoniae
APVSHIWYFK

SEQ ID NO: 726 - protein, 12 aa, Streptococcus pneumoniae
NPKGEAVITEVK

SEQ ID NO: 727 - protein, 11 aa, Streptococcus pneumoniae
FASSDLNDLYR

SEQ ID NO: 728 - protein, 12 aa, Streptococcus pneumoniae
NPIVMMMDSGAR

SEQ ID NO: 729 - protein, 13 aa, Streptococcus pneumoniae
GRPITGPGSRPLK

SEQ ID NO: 730 - protein, 13 aa, Streptococcus pneumoniae
GQVTAIEEDASTR

SEQ ID NO: 731 - protein, 12 aa, Streptococcus pneumoniae
LREYGYGSFVAK

SEQ ID NO: 732 - protein, 13 aa, Streptococcus pneumoniae
GNISNFSQLAGMR

SEQ ID NO: 733 - protein, 13 aa, Streptococcus pneumoniae
EIVNAGVEEVTIR

SEQ ID NO: 734 - protein, 13 aa, Streptococcus pneumoniae
EGLFDEVIFGPTK

SEQ ID NO: 735 - protein, 12 aa, Streptococcus pneumoniae
FASSDLNDLYRR

SEQ ID NO: 736 - protein, 13 aa, Streptococcus pneumoniae
ILMLAAEHILNPK

SEQ ID NO: 737 - protein, 13 aa, Streptococcus pneumoniae
EAISNLELNPPFK

SEQ ID NO: 738 - protein, 14 aa, Streptococcus pneumoniae
LGIQAFEPVLIDGK

SEQ ID NO: 739 - protein, 13 aa, Streptococcus pneumoniae
GIVCDRCGVEVTR

SEQ ID NO: 740 - protein, 14 aa, Streptococcus pneumoniae
MLQEAVDALIDNGR

SEQ ID NO: 741 - protein, 13 aa, Streptococcus pneumoniae
EMAIELFKPFVMR

SEQ ID NO: 742 - protein, 15 aa, Streptococcus pneumoniae
GIPSRMGLTLDMSPR

SEQ ID NO: 743 - protein, 19 aa, Streptococcus pneumoniae
HPETGAVIIGPNELITEDK

SEQ ID NO: 744 - protein, 19 aa, Streptococcus pneumoniae
VFVKGETGEGEYVVPFTAR

SEQ ID NO: 745 - protein, 10 aa, Pseudomonas aeruginosa
LLAGETADLR

SEQ ID NO: 746 - protein, 9 aa, Pseudomonas aeruginosa
FNHLFGNGR

SEQ ID NO: 747 - protein, 10 aa, Pseudomonas aeruginosa
IATPFIAELR

SEQ ID NO: 748 - protein, 9 aa, Pseudomonas aeruginosa
CDDPARIQR

SEQ ID NO: 749 - protein, 11 aa, Pseudomonas aeruginosa
RIATPFIAELR

SEQ ID NO: 750 - protein, 13 aa, Pseudomonas aeruginosa
LLDAAGEQLLLSR

SEQ ID NO: 751 - protein, 12 aa, Pseudomonas aeruginosa
LVSFRDDDGSFR

SEQ ID NO: 752 - protein, 13 aa, Pseudomonas aeruginosa
SYDNTIPLFSPSR

SEQ ID NO: 753 - protein, 13 aa, Pseudomonas aeruginosa
LFQLLDNELGEAR

SEQ ID NO: 754 - protein, 14 aa, Pseudomonas aeruginosa
DIGQRFNHLFGNGR

SEQ ID NO: 755 - protein, 15 aa, Pseudomonas aeruginosa
LFQLLDNELGEARER

SEQ ID NO: 756 - protein, 18 aa, Pseudomonas aeruginosa
SRLEIAATWLAGGLDVER

SEQ ID NO: 757 - protein, 19 aa, Pseudomonas aeruginosa
LLDAAGEQLLLSRAFADGK

SEQ ID NO: 758 - protein, 18 aa, Pseudomonas aeruginosa
RSDVDSFYFLADYHALIK

SEQ ID NO: 759 - protein, 24 aa, Pseudomonas aeruginosa
DPDSSHLFLLYSAFASAEQVAAFR

SEQ ID NO: 760 - protein, 7 aa, Enterococcus faecalis
IKPIVEK

SEQ ID NO: 761 - protein, 7 aa, Enterococcus faecalis
QGSFIQR

SEQ ID NO: 762 - protein, 8 aa, Enterococcus faecalis
QIEFLAGR

SEQ ID NO: 763 - protein, 9 aa, Enterococcus faecalis
RQIEFLAGR

SEQ ID NO: 764 - protein, 11 aa, Enterococcus faecalis
GIGIDAVELSR

SEQ ID NO: 765 - protein, 12 aa, Enterococcus faecalis
VGLQDIEVLTEK

SEQ ID NO: 766 - protein, 12 aa, Enterococcus faecalis
VLTPNELTLFEK

SEQ ID NO: 767 - protein, 12 aa, Enterococcus faecalis
QIEFLAGRFACK

SEQ ID NO: 768 - protein, 8 aa, Enterococcus faecalis
EALAAFFK

SEQ ID NO: 769 - protein, 8 aa, Enterococcus faecalis
ENVEPNTR

SEQ ID NO: 770 - protein, 8 aa, Enterococcus faecalis
DGLYHQNR

SEQ ID NO: 771 - protein, 8 aa, Enterococcus faecalis
FYSQYALK

SEQ ID NO: 772 - protein, 10 aa, Enterococcus faecalis
SINSALQLSR

SEQ ID NO: 773 - protein, 10 aa, Enterococcus faecalis
DKEALAAFFK

SEQ ID NO: 774 - protein, 9 aa, Enterococcus faecalis
NQVFHNFEK

SEQ ID NO: 775 - protein, 10 aa, Enterococcus faecalis
ARDLENEISK

SEQ ID NO: 776 - protein, 11 aa, Enterococcus faecalis
SDYASGAYFDK

SEQ ID NO: 777 - protein, 13 aa, Enterococcus faecalis
IGGGVGITLSNLR

SEQ ID NO: 778 - protein, 14 aa, Enterococcus faecalis
GYDGAASGVVPVMK

SEQ ID NO: 779 - protein, 11 aa, Enterococcus faecalis
SEIPEGLYEWK

SEQ ID NO: 780 - protein, 11 aa, Enterococcus faecalis
EDFIETEFIEK

SEQ ID NO: 781 - protein, 11 aa, Enterococcus faecalis
EYDNLVANPIR

SEQ ID NO: 782 - protein, 13 aa, Enterococcus faecalis
YQPATPSFLNAGR

SEQ ID NO: 783 - protein, 11 aa, Enterococcus faecalis
ERNQVFHNFEK

SEQ ID NO: 784 - protein, 13 aa, Enterococcus faecalis
EYGVPYSYVDITK

SEQ ID NO: 785 - protein, 14 aa, Enterococcus faecalis
YQPATPSFLNAGRK

SEQ ID NO: 786 - protein, 14 aa, Enterococcus faecalis
DIQIPTAEDWAALR

SEQ ID NO: 787 - protein, 14 aa, Enterococcus faecalis
NNAGTEYLETYEDR

SEQ ID NO: 788 - protein, 13 aa, Enterococcus faecalis
LYAFLDEQHFQFK

SEQ ID NO: 789 - protein, 15 aa, Enterococcus faecalis
SEIPEGLYEWKETPK

SEQ ID NO: 790 - protein, 7 aa, Enterococcus faecalis
EFHVELR

SEQ ID NO: 791 - protein, 11 aa, Enterococcus faecalis
NEAGLLIGQQR

SEQ ID NO: 792 - protein, 10 aa, Enterococcus faecalis
ALKEFHVELR

SEQ ID NO: 793 - protein, 11 aa, Enterococcus faecalis
LNDYLDVLIPR

SEQ ID NO: 794 - protein, 14 aa, Enterococcus faecalis
QVATLPDPIGEVDK

SEQ ID NO: 795 - protein, 14 aa, Enterococcus faecalis
VVDSLDEAIQHINR

SEQ ID NO: 796 - protein, 18 aa, Enterococcus faecalis
VVDSLDEAIQHINRYNTK

SEQ ID NO: 797 - protein, 19 aa, Enterococcus faecalis
ETAQQLMRLNDYLDVLIPR

SEQ ID NO: 798 - protein, 24 aa, Enterococcus faecalis
ILQANALDLEQAATHGISETMQDR

SEQ ID NO: 799 - protein, 9 aa, Enterococcus faecalis
KPIIAGNWK

SEQ ID NO: 800 - protein, 11 aa, Enterococcus faecalis
TAEWIEGQITK

SEQ ID NO: 801 - protein, 11 aa, Enterococcus faecalis
MRKPIIAGNWK

SEQ ID NO: 802 - protein, 13 aa, Enterococcus faecalis
TLSEAQSFAEAVK

SEQ ID NO: 803 - protein, 12 aa, Enterococcus faecalis
EYFHETDEDINK

SEQ ID NO: 804 - protein, 15 aa, Enterococcus faecalis
SADANIADEICGVVR

SEQ ID NO: 805 - protein, 13 aa, Enterococcus faecalis
EYFHETDEDINKK

SEQ ID NO: 806 - protein, 18 aa, Enterococcus faecalis
IQYGGSVKPENIAEYMAK

SEQ ID NO: 807 - protein, 24 aa, Enterococcus faecalis
AIFANGMTPIFCCGETLETYEAGK

SEQ ID NO: 808 - protein, 28 aa, Enterococcus faecalis
NAVPSNDVVDAVIGSPALFLAPLAWNLK

SEQ ID NO: 809 - protein, 8 aa, Enterococcus faecalis
TEILEELR

SEQ ID NO: 810 - protein, 9 aa, Enterococcus faecalis
EVTFPETIK

SEQ ID NO: 811 - protein, 10 aa, Enterococcus faecalis
NSAIPFLDLK

SEQ ID NO: 812 - protein, 9 aa, Enterococcus faecalis
TEILEELRK

SEQ ID NO: 813 - protein, 10 aa, Enterococcus faecalis
SKTEILEELR

SEQ ID NO: 814 - protein, 11 aa, Enterococcus faecalis
IEDYVVENDAR

SEQ ID NO: 815 - protein, 13 aa, Enterococcus faecalis
EKIEDYVVENDAR

SEQ ID NO: 816 - protein, 15 aa, Enterococcus faecalis
NSAIPFLDLKDINAR

SEQ ID NO: 817 - protein, 15 aa, Enterococcus faecalis
MDAYEIIQYIGDAKK

SEQ ID NO: 818 - protein, 19 aa, Enterococcus faecalis
TGTLFGDWADVKPFLEANK

SEQ ID NO: 819 - protein, 21 aa, Enterococcus faecalis
IEDYVVENDARNSAIPFLDLK

SEQ ID NO: 820 - protein, 25 aa, Enterococcus faecalis
VFNNCKTGTLFGDWADVKPFLEANK

SEQ ID NO: 821 - protein, 10 aa, Pseudomonas aeruginosa
QIAYTEPAVR

SEQ ID NO: 822 - protein, 12 aa, Pseudomonas aeruginosa
VISVELPTTIVR

SEQ ID NO: 823 - protein, 13 aa, Pseudomonas aeruginosa
NLLTGAGTETVFK

SEQ ID NO: 824 - protein, 12 aa, Pseudomonas aeruginosa
ADDKLEPIILDR

SEQ ID NO: 825 - protein, 15 aa, Pseudomonas aeruginosa
LKNLLTGAGTETVFK

SEQ ID NO: 826 - protein, 21 aa, Pseudomonas aeruginosa
AGQVANINGAPWVIQKAEFNK

SEQ ID NO: 827 - protein, 24 aa, Pseudomonas aeruginosa
LNNGAELQVSAFCEIGDSIEIDTR

SEQ ID NO: 828 - protein, 9 aa, Enterococcus faecalis
GIDSTVFAK

SEQ ID NO: 829 - protein, 10 aa, Enterococcus faecalis
LTILGSGGVR

SEQ ID NO: 830 - protein, 8 aa, Enterococcus faecalis
EKSNDFDR

SEQ ID NO: 831 - protein, 8 aa, Enterococcus faecalis
DFTNWLTK

SEQ ID NO: 832 - protein, 9 aa, Enterococcus faecalis
KDEHLSLAK

SEQ ID NO: 833 - protein, 11 aa, Enterococcus faecalis
KLTILGSGGVR

SEQ ID NO: 834 - protein, 11 aa, Enterococcus faecalis
EINQQLGIIAK

SEQ ID NO: 835 - protein, 13 aa, Enterococcus faecalis
AKEINQQLGIIAK

SEQ ID NO: 836 - protein, 16 aa, Enterococcus faecalis
ETGLLVATGSVSAALK

SEQ ID NO: 837 - protein, 15 aa, Enterococcus faecalis
IEAIVQAVEVPVIVK

SEQ ID NO: 838 - protein, 18 aa, Enterococcus faecalis
NGLENTLALVQQWQEEVK

SEQ ID NO: 839 - protein, 21 aa, Enterococcus faecalis
ENPDGLIFANIGAGLGVEEAK

SEQ ID NO: 840 - protein, 22 aa, Enterococcus faecalis
ENPDGLIFANIGAGLGVEEAKR

SEQ ID NO: 841 - protein, 7 aa, Enterococcus faecalis
LAWSFEK

SEQ ID NO: 842 - protein, 9 aa, Enterococcus faecalis
SAVIYCPGK

SEQ ID NO: 843 - protein, 9 aa, Enterococcus faecalis
DTANEYQAR

SEQ ID NO: 844 - protein, 12 aa, Enterococcus faecalis
NSLTGLPIGGGK

SEQ ID NO: 845 - protein, 9 aa, Enterococcus faecalis
FLAFEQIFK

SEQ ID NO: 846 - protein, 10 aa, Enterococcus faecalis
EIGYLFGMYK

SEQ ID NO: 847 - protein, 11 aa, Enterococcus faecalis
VQYNSAIGPYK

SEQ ID NO: 848 - protein, 11 aa, Enterococcus faecalis
FHPSVNLSVMK

SEQ ID NO: 849 - protein, 11 aa, Enterococcus faecalis
EIGYLFGMYKR

SEQ ID NO: 850 - protein, 11 aa, Enterococcus faecalis
FCQSFMTELQK

SEQ ID NO: 851 - protein, 13 aa, Enterococcus faecalis
TEATGYGTVYFVK

SEQ ID NO: 852 - protein, 13 aa, Enterococcus faecalis
HLLADKNDTFEGK

SEQ ID NO: 853 - protein, 14 aa, Enterococcus faecalis
DNFVLGANIAGFEK

SEQ ID NO: 854 - protein, 16 aa, Enterococcus faecalis
VAVSGSGNVAIYAMEK

SEQ ID NO: 855 - protein, 14 aa, Enterococcus faecalis
GYRVQYNSAIGPYK

SEQ ID NO: 856 - protein, 9 aa, Streptococcus pneumoniae
IEDALNATR

SEQ ID NO: 857 - protein, 10 aa, Streptococcus pneumoniae
GVDILADTVK

SEQ ID NO: 858 - protein, 10 aa, Streptococcus pneumoniae
DGVITIEESR

SEQ ID NO: 859 - protein, 12 aa, Streptococcus pneumoniae
NVTAGANPIGIR

SEQ ID NO: 860 - protein, 12 aa, Streptococcus pneumoniae
EAIAQVAAVSSR

SEQ ID NO: 861 - protein, 12 aa, Streptococcus pneumoniae
DATIEALGQAAR

SEQ ID NO: 862 - protein, 11 aa, Streptococcus pneumoniae
VGEYISEAMEK

SEQ ID NO: 863 - protein, 11 aa, Streptococcus pneumoniae
LRIEDALNATR

SEQ ID NO: 864 - protein, 14 aa, Streptococcus pneumoniae
GIETAVAAAVEALK

SEQ ID NO: 865 - protein, 13 aa, Streptococcus pneumoniae
VGKDGVITIEESR

SEQ ID NO: 866 - protein, 12 aa, Streptococcus pneumoniae
SQIETTTSEFDR

SEQ ID NO: 867 - protein, 15 aa, Streptococcus pneumoniae
RGIETAVAAAVEALK

SEQ ID NO: 868 - protein, 13 aa, Streptococcus pneumoniae
GYLSQYMVTDSEK

SEQ ID NO: 869 - protein, 16 aa, Streptococcus pneumoniae
SFGSPLITNDGVTIAK

SEQ ID NO: 870 - protein, 23 aa, Streptococcus pneumoniae
VTVDKDSTVIVEGAGNPEAISHR

SEQ ID NO: 871 - protein, 7 aa, Staphylococcus aureus
ISWQIAK

SEQ ID NO: 872 - protein, 8 aa, Staphylococcus aureus
KISWQIAK

SEQ ID NO: 873 - protein, 9 aa, Staphylococcus aureus
VGYSAETVR

SEQ ID NO: 874 - protein, 11 aa, Staphylococcus aureus
VIDVVISGAFK

SEQ ID NO: 875 - protein, 10 aa, Staphylococcus aureus
FFQKNVAVQR

SEQ ID NO: 876 - protein, 13 aa, Staphylococcus aureus
MPGKVGYSAETVR

SEQ ID NO: 877 - protein, 11 aa, Staphylococcus aureus
WNNRFSMAMLE

SEQ ID NO: 878 - protein, 13 aa, Staphylococcus aureus
AQQYIGYLSTGEK

SEQ ID NO: 879 - protein, 13 aa, Staphylococcus aureus
SIGVYQDIDDEIR

SEQ ID NO: 880 - protein, 15 aa, Staphylococcus aureus
AQQYIGYLSTGEKQR

SEQ ID NO: 881 - protein, 17 aa, Staphylococcus aureus
FQEGERVIDVVISGAFK

SEQ ID NO: 882 - protein, 19 aa, Staphylococcus aureus
QHIGFVSHSLLEKFQEGER

SEQ ID NO: 883 - protein, 8 aa, Pseudomonas aeruginosa
LVREELIK

SEQ ID NO: 884 - protein, 9 aa, Pseudomonas aeruginosa
KLPMVADLR

SEQ ID NO: 885 - protein, 10 aa, Pseudomonas aeruginosa
IRGEQEELLK

SEQ ID NO: 886 - protein, 10 aa, Pseudomonas aeruginosa
QLLSEWLQFR

SEQ ID NO: 887 - protein, 13 aa, Pseudomonas aeruginosa
SYSLPAHSLPSAR

SEQ ID NO: 888 - protein, 13 aa, Pseudomonas aeruginosa
SNQYAVFIDSTGR

SEQ ID NO: 889 - protein, 14 aa, Pseudomonas aeruginosa
ALPHIGDGLKPVQR

SEQ ID NO: 890 - protein, 15 aa, Pseudomonas aeruginosa
VNLNIIGLDGKPQVK

SEQ ID NO: 891 - protein, 15 aa, Pseudomonas aeruginosa
DVEQDWLAAVTTEGR

SEQ ID NO: 892 - protein, 18 aa, Pseudomonas aeruginosa
ALLSLPNGSAVVAPRPVR

SEQ ID NO: 893 - protein, 19 aa, Pseudomonas aeruginosa
VEDGDIVIHALPHQVSGSK

SEQ ID NO: 894 - protein, 22 aa, Pseudomonas aeruginosa
EEYLTDLAVLPAGATLVLQAGK

SEQ ID NO: 895 - protein, 9 aa, Helicobacter pylori
IELGGVPYR

SEQ ID NO: 896 - protein, 9 aa, Helicobacter pylori
IVETAPNFK

SEQ ID NO: 897 - protein, 11 aa, Helicobacter pylori
IVEYQHVKPGK

SEQ ID NO: 898 - protein, 12 aa, Helicobacter pylori
GLKIELGGVPYR

SEQ ID NO: 899 - protein, 13 aa, Helicobacter pylori
AISVDVPQVVALK

SEQ ID NO: 900 - protein, 11 aa, Helicobacter pylori
VNTETEEYLEK

SEQ ID NO: 901 - protein, 17 aa, Helicobacter pylori
IVETAPNFKGDTSSASK

1. A composition comprising an isolated, recombinant polypeptide, wherein the polypeptide comprises: (a) an amino acid sequence set forth in SEQ ID NO: 563 or SEQ ID NO: 565; (b) an amino acid sequence having at least about 95% identity with the amino acid sequence set forth in SEQ ID NO: 563 or SEQ ID NO: 565; or (c) an amino acid sequence encoded by a polynucleotide that hybridizes under stringent conditions to the complementary strand of a polynucleotide having SEQ ID NO: 562 or SEQ ID NO: 564 and has at least one biological activity of enoyl-(acyl-carrier-protein) reductase (NADH) from H. pylori; and wherein the polypeptide of (a), (b) or (c) is at least about 90% pure in a sample of the composition.

2. The composition of claim 1, wherein at least about two-thirds of the polypeptide in the sample is soluble.

3. The composition of claim 1, wherein the polypeptide is fused to at least one heterologous polypeptide that increases the solubility or stability of the polypeptide.

4. The composition of claim 1, further comprising a matrix suitable for mass spectrometry.

5. The composition of claim 1, wherein the matrix is a nicotinic acid derivative or a cinnamic acid derivative.

6. A composition of claim 1, wherein the polypeptide is enriched in at least one NMR isotope.

7. The composition of claim 6, wherein the NMR isotope is one of the following: hydrogen-1 (1 H), hydrogen-2 (2H), hydrogen-3 (3H), phosphorous-31 (3 1P), sodium-23 (23Na), nitrogen-14 (14N), nitrogen-15 (15N), carbon-13 (13C) and fluorine-19 (19F).

8. The composition of claim 6, further comprising a deuterium lock solvent.

9. The composition of claim 8, wherein the deuterium lock solvent is one of the following: acetone (CD3COCD3), chloroform (CDC13), dichloromethane (CD2Cl2), methylnitrile (CD3CN), benzene (C6D6), water (D2O), diethylether ((CD3CD2)2O), dimethylether ((CD3)2O), N,N-dimethylformamide ((CD3)2NCDO), dimethyl sulfoxide (CD3SOCD3), ethanol (CD3CD2OD), methanol (CD3OD), tetrahydrofuran (C4D8O), toluene (C6D5CD3), pyridine (C5D5N) and cyclohexane (C6H12).

10. The composition of claim 1, wherein the polypeptide is labeled with a heavy atom.

11. The composition of claim 10, wherein the heavy atom is one of the following: cobalt, selenium, krypton, bromine, strontium, molybdenum, ruthenium, rhodium, palladium, silver, cadmium, tin, iodine, xenon, barium, lanthanum, cerium, praseodymium, neodymium, samarium, europium, gadolinium, terbium, dysprosium, holmium, erbium, thulium, ytterbium, lutetium, tantalum, tungsten, rhenium, osmium, iridium, platinum, gold, mercury, thallium, lead, thorium and uranium.

12. The composition of claim 10, wherein the polypeptide is labeled with seleno-methionine.

13. A crystallized, recombinant polypeptide comprising: (a) an amino acid sequence set forth in SEQ ID NO: 563 or SEQ ID NO: 565; (b) an amino acid sequence having at least about 95% identity with the amino acid sequence set forth in SEQ ID NO: 563 or SEQ ID NO: 565; or (c) an amino acid sequence encoded by a polynucleotide that hybridizes under stringent conditions to the complementary strand of a polynucleotide having SEQ ID NO: 562 or SEQ ID NO: 564 and has at least one biological activity of enoyl-(acyl-carrier-protein) reductase (NADH) from H. pylori; wherein the polypeptide of (a), (b) or (c) is in crystal form.

14. The crystallized, recombinant polypeptide of claim 13, wherein the polypeptide is labeled with a heavy atom.

15. The crystallized, recombinant polypeptide of claim 13, wherein the polypeptide is labeled with seleno-methionine.

16. The crystallized, recombinant polypeptide of claim 13, which diffracts x-rays to a resolution of about 3.5 Å or better.

17. A crystallized complex comprising the crystallized, recombinant polypeptide of claim 13 and a co-factor, wherein the complex is in crystal form.

18. A crystallized complex comprising the crystallized, recombinant polypeptide of claim 13 and a small organic molecule, wherein the complex is in crystal form.

19. A composition comprising the crystallized, recombinant polypeptide of claim 13 and a cryo-protectant.

20. The composition of claim 19, wherein the cryo-protectant is one of the following: methyl pentanediol, isopropanol, ethylene glycol, glycerol, formate, citrate, mineral oil and a low-molecular-weight polyethylene glycol.

21. A host cell comprising a nucleic acid encoding a polypeptide of claim 1; wherein a culture of the host cell produces at least about 1 mg of the polypeptide per liter of culture and the polypeptide is at least about one-third soluble as measured by gel electrophoresis.

22-84. (canceled)

85. A composition selected from the group consisting of:
A) a composition comprising an isolated, recombinant polypeptide, wherein the polypeptide comprises: (a) an amino acid sequence set forth in SEQ ID NO: 5 or SEQ ID NO: 7; (b) an amino acid sequence having at least about 95% identity with the amino acid sequence set forth in SEQ ID NO: 5 or SEQ ID NO: 7; or (c) an amino acid sequence encoded by a polynucleotide that hybridizes under stringent conditions to the complementary strand of a polynucleotide having SEQ ID NO: 4 or SEQ ID NO: 6 and has at least one biological activity of lysyl-tRNA synthetase from S. aureus; and wherein the polypeptide of (a), (b) or (c) is at least about 90% pure in a sample of the composition;
B) a composition comprising an isolated, recombinant polypeptide, wherein the polypeptide comprises: (a) an amino acid sequence set forth in SEQ ID NO: 14 or SEQ ID NO: 16; (b) an amino acid sequence having at least about 95% identity with the amino acid sequence set forth in SEQ ID NO: 14 or SEQ ID NO: 16; or (c) an amino acid sequence encoded by a polynucleotide that hybridizes under stringent conditions to the complementary strand of a polynucleotide having SEQ ID NO: 13 or SEQ ID NO: 15 and has at least one biological activity of valine tRNA synthetase from S. pneumoniae; and wherein the polypeptide of (a), (b) or (c) is at least about 90% pure in a sample of the composition;
C) a composition comprising an isolated, recombinant polypeptide comprising: (a) an amino acid sequence set forth in SEQ ID NO: 23 or SEQ ID NO: 25; (b) an amino acid sequence having at least about 90% identity with the amino acid sequence set forth in SEQ ID NO: 23 or SEQ ID NO: 25; or (c) an amino acid sequence encoded by a polynucleotide that hybridizes under stringent conditions to the complementary strand of a polynucleotide having SEQ ID NO: 22 or SEQ ID NO: 24 and has at least one biological activity of aspartate tRNA synthetase from S. pneumoniae; and wherein the polypeptide of (a), (b) or (c) is at least about 90% pure in a sample of the composition;
D) a composition comprising an isolated, recombinant polypeptide, wherein the polypeptide comprises: (a) an amino acid sequence set forth in SEQ ID NO: 32 or SEQ ID NO: 34; (b) an amino acid sequence having at least about 95% identity with the amino acid sequence set forth in SEQ ID NO: 32 or SEQ ID NO: 34; or (c) an amino acid sequence encoded by a polynucleotide that hybridizes under stringent conditions to the complementary strand of a polynucleotide having SEQ ID NO: 31 or SEQ ID NO: 33 and has at least one biological activity of cysteine tRNA synthetase from H. pylori; and wherein the polypeptide of (a), (b) or (c) is at least about 90% pure in a sample of the composition;
E) a composition comprising an isolated, recombinant polypeptide, wherein the polypeptide comprises: (a) an amino acid sequence set forth in SEQ ID NO: 41 or SEQ ID NO: 43; (b) an amino acid sequence having at least about 95% identity with the amino acid sequence set forth in SEQ ID NO: 41 or SEQ ID NO: 43; or (c) an amino acid sequence encoded by a polynucleotide that hybridizes under stringent conditions to the complementary strand of a polynucleotide having SEQ ID NO: 40 or SEQ ID NO: 42 and has at least one biological activity of malonyl-CoA-[acyl-carrier-protein] transacylase from P. aeruginosa; and wherein the polypeptide of (a), (b) or (c) is at least about 90% pure in a sample of the composition;
F) a composition comprising an isolated, recombinant polypeptide, wherein the polypeptide comprises: (a) an amino acid sequence set forth in SEQ ID NO: 50 or SEQ ID NO: 52; (b) an amino acid sequence having at least about 95% identity with the amino acid sequence set forth in SEQ ID NO: 50 or SEQ ID NO: 52; or (c) an amino acid sequence encoded by a polynucleotide that hybridizes under stringent conditions to the complementary strand of a polynucleotide having SEQ ID NO: 49 or SEQ ID NO: 51 and has at least one biological activity of glutamate tRNA synthetase, catalytic subunit from H. pylori; and wherein the polypeptide of (a), (b) or (c) is at least about 90% pure in a sample of the composition;
G) a composition comprising an isolated, recombinant polypeptide, wherein the polypeptide comprises: (a) an amino acid sequence set forth in SEQ ID NO: 59 or SEQ ID NO: 61; (b) an amino acid sequence having at least about 95% identity with the amino acid sequence set forth in SEQ ID NO: 59 or SEQ ID NO: 61; or (c) an amino acid sequence encoded by a polynucleotide that hybridizes under stringent conditions to the complementary strand of a polynucleotide having SEQ ID NO: 58 or SEQ ID NO: 60 and has at least one biological activity of protein chain initiation factor IF-1 from P. aeruginosa; and wherein the polypeptide of (a), (b) or (c) is at least about 90% pure in a sample of the composition;
H) a composition comprising an isolated, recombinant polypeptide, wherein the polypeptide comprises: (a) an amino acid sequence set forth in SEQ ID NO: 68 or SEQ ID NO: 70; (b) an amino acid sequence having at least about 95% identity with the amino acid sequence set forth in SEQ ID NO: 68 or SEQ ID NO: 70; or (c) an amino acid sequence encoded by a polynucleotide that hybridizes under stringent conditions to the complementary strand of a polynucleotide having SEQ ID NO: 67 or SEQ ID NO: 69 and has at least one biological activity of translation initiation factor IF-3 from S. pneumoniae; and wherein the polypeptide of (a), (b) or (c) is at least about 90% pure in a sample of the composition;
I) A composition comprising an isolated, recombinant polypeptide, wherein the polypeptide comprises: (a) an amino acid sequence set forth in SEQ ID NO: 77 or SEQ ID NO: 79; (b) an amino acid sequence having at least about 95% identity with the amino acid sequence set forth in SEQ ID NO: 77 or SEQ ID NO: 79; or (c) an amino acid sequence encoded by a polynucleotide that hybridizes under stringent conditions to the complementary strand of a polynucleotide having SEQ ID NO: 76 or SEQ ID NO: 78 and has at least one biological activity of threonine tRNA synthetase from S. pneumoniae; and wherein the polypeptide of (a), (b) or (c) is at least about 90% pure in a sample of the composition;
J) a composition comprising an isolated, recombinant polypeptide, wherein the polypeptide comprises: (a) an amino acid sequence set forth in SEQ ID NO: 86 or SEQ ID NO: 88; (b) an amino acid sequence having at least about 95% identity with the amino acid sequence set forth in SEQ ID NO: 86 or SEQ ID NO: 88; or (c) an amino acid sequence encoded by a polynucleotide that hybridizes under stringent conditions to the complementary strand of a polynucleotide having SEQ ID NO: 85 or SEQ ID NO: 87 and has at least one biological activity of conserved hypothetical protein from H. pylori; and wherein the polypeptide of (a), (b) or (c) is at least about 90% pure in a sample of the composition;
K) a composition comprising an isolated, recombinant polypeptide, wherein the polypeptide comprises: (a) an amino acid sequence set forth in SEQ ID NO: 95 or SEQ ID NO: 97; (b) an amino acid sequence having at least about 95% identity with the amino acid sequence set forth in SEQ ID NO: 95 or SEQ ID NO: 97; or (c) an amino acid sequence encoded by a polynucleotide that hybridizes under stringent conditions to the complementary strand of a polynucleotide having SEQ ID NO: 94 or SEQ ID NO: 96 and has at least one biological activity of cysteine tRNA synthetase from E. coli; and wherein the polypeptide of (a), (b) or (c) is at least about 90% pure in a sample of the composition;
L) a composition comprising an isolated, recombinant polypeptide, wherein the polypeptide comprises: (a) an amino acid sequence set forth in SEQ ID NO: 104 or SEQ ID NO: 106; (b) an amino acid sequence having at least about 95% identity with the amino acid sequence set forth in SEQ ID NO: 104 or SEQ ID NO: 106; or (c) an amino acid sequence encoded by a polynucleotide that hybridizes under stringent conditions to the complementary strand of a polynucleotide having SEQ ID NO: 103 or SEQ ID NO: 105 and has at least one biological activity of DNA polymerase III, beta-subunit from H. pylori; and wherein the polypeptide of (a), (b) or (c) is at least about 90% pure in a sample of the composition;
M) a composition comprising an isolated, recombinant polypeptide, wherein the polypeptide comprises: (a) an amino acid sequence set forth in SEQ ID NO: 113 or SEQ ID NO: 115; (b) an amino acid sequence having at least about 95% identity with the amino acid sequence set forth in SEQ ID NO: 113 or SEQ ID NO: 115; or (c) an amino acid sequence encoded by a polynucleotide that hybridizes under stringent conditions to the complementary strand of a polynucleotide having SEQ ID NO: 112 or SEQ ID NO: 114 and has at least one biological activity of 3-oxoacyl-[acyl-carrier-protein] synthase II from S. pneumoniae; and wherein the polypeptide of (a), (b) or (c) is at least about 90% pure in a sample of the composition;
N) a composition comprising an isolated, recombinant polypeptide, wherein the polypeptide comprises: (a) an amino acid sequence set forth in SEQ ID NO: 122 or SEQ ID NO: 124; (b) an amino acid sequence having at least about 95% identity with the amino acid sequence set forth in SEQ ID NO: 122 or SEQ ID NO: 124; or (c) an amino acid sequence encoded by a polynucleotide that hybridizes under stringent conditions to the complementary strand of a polynucleotide having SEQ ID NO: 121 or SEQ ID NO: 123 and has at least one biological activity of methionine aminopeptidase from H. pylori; and wherein the polypeptide of (a), (b) or (c) is at least about 90% pure in a sample of the composition;
O) a composition comprising an isolated, recombinant polypeptide, wherein the polypeptide comprises: (a) an amino acid sequence set forth in SEQ ID NO: 131 or SEQ ID NO: 133; (b) an amino acid sequence having at least about 95% identity with the amino acid sequence set forth in SEQ ID NO: 131 or SEQ ID NO: 133; or (c) an amino acid sequence encoded by a polynucleotide that hybridizes under stringent conditions to the complementary strand of a polynucleotide having SEQ ID NO: 130 or SEQ ID NO: 132 and has at least one biological activity of pyruvate kinase from S. pneumoniae; and wherein the polypeptide of (a), (b) or (c) is at least about 90% pure in a sample of the composition;
P) a composition comprising an isolated, recombinant polypeptide, wherein the polypeptide comprises: (a) an amino acid sequence set forth in SEQ ID NO: 140 or SEQ ID NO: 142; (b) an amino acid sequence having at least about 95% identity with the amino acid sequence set forth in SEQ ID NO: 140 or SEQ ID NO: 142; or (c) an amino acid sequence encoded by a polynucleotide that hybridizes under stringent conditions to the complementary strand of a polynucleotide having SEQ ID NO: 139 or SEQ ID NO: 141 and has at least one biological activity of threonine tRNA synthetase from H. pylori; and wherein the polypeptide of (a), (b) or (c) is at least about 90% pure in a sample of the composition;
Q) a composition comprising an isolated, recombinant polypeptide, wherein the polypeptide comprises: (a) an amino acid sequence set forth in or; (b) an amino acid sequence having at least about 95% identity with the amino acid sequence set forth in SEQ ID NO: 149 or SEQ ID NO: 151; or (c) an amino acid sequence encoded by a polynucleotide that hybridizes under stringent conditions to the complementary strand of a polynucleotide having SEQ ID NO: 148 or SEQ ID NO: 150 and has at least one biological activity of putative ATP-binding component of a transport system from P. aeruginosa; and wherein the polypeptide of (a), (b) or (c) is at least about 90% pure in a sample of the composition;
R) a composition comprising an isolated, recombinant polypeptide, wherein the polypeptide comprises: (a) an amino acid sequence set forth in SEQ ID NO: 158 or SEQ ID NO: 160; (b) an amino acid sequence having at least about 95% identity with the anino acid sequence set forth in SEQ ID NO: 158 or SEQ ID NO: 160; or (c) an amino acid sequence encoded by a polynucleotide that hybridizes under stringent conditions to the complementary strand of a polynucleotide having SEQ ID NO: 157 or SEQ ID NO: 159 and has at least one biological activity of glucose-6-phosphate dehydrogenase from S. pneumoniae; and wherein the polypeptide of (a), (b) or (c) is at least about 90% pure in a sample of the composition;
S) a composition comprising an isolated, recombinant polypeptide, wherein the polypeptide comprises: (a) an amino acid sequence set forth in SEQ ID NO: 167 or SEQ ID NO: 169; (b) an amino acid sequence having at least about 95% identity with the amino acid sequence set forth in SEQ ID NO: 167 or SEQ ID NO: 169; or (c) an amino acid sequence encoded by a polynucleotide that hybridizes under stringent conditions to the complementary strand of a polynucleotide having SEQ ID NO: 166 or SEQ ID NO: 168 and has at least one biological activity of alanyl-tRNA synthetase from S. pneumoniae; and wherein the polypeptide of (a), (b) or (c) is at least about 90% pure in a sample of the composition;
T) a composition comprising an isolated, recombinant polypeptide, wherein the polypeptide comprises: (a) an amino acid sequence set forth in SEQ ID NO: 176 or SEQ ID NO: 178; (b) an amino acid sequence having at least about 95% identity with the amino acid sequence set forth in SEQ ID NO: 176 or SEQ ID NO: 178; or (c) an amino acid sequence encoded by a polynucleotide that hybridizes under stringent conditions to the complementary strand of a polynucleotide having SEQ ID NO: 175 or SEQ ID NO: 177 and has at least one biological activity of glutamate tRNA synthetase, catalytic subunit from S. pneumoniae; and wherein the polypeptide of (a), (b) or (c) is at least about 90% pure in a sample of the composition;
U) a composition comprising an isolated, recombinant polypeptide, wherein the polypeptide comprises: (a) an amino acid sequence set forth in SEQ ID NO: 185 or SEQ ID NO: 187; (b) an amino acid sequence having at least about 95% identity with the amino acid sequence set forth in SEQ ID NO: 185 or SEQ ID NO: 187; or (c) an amino acid sequence encoded by a polynucleotide that hybridizes under stringent conditions to the complementary strand of a polynucleotide having SEQ ID NO: 184 or SEQ ID NO: 186 and has at least one biological activity of isoleucine tRNA synthetase from S. pneumoniae; and wherein the polypeptide of (a), (b) or (c) is at least about 90% pure in a sample of the composition;
V) a composition comprising an isolated, recombinant polypeptide, wherein the polypeptide comprises: (a) an amino acid sequence set forth in SEQ ID NO: 194 or SEQ ID NO: 196; (b) an amino acid sequence having at least about 95% identity with the amino acid sequence set forth in SEQ ID NO: 194 or SEQ ID NO: 196; or (c) an amino acid sequence encoded by a polynucleotide that hybridizes under stringent conditions to the complementary strand of a polynucleotide having SEQ ID NO: 193 or SEQ ID NO: 195 and has at least one biological activity of RNA polymerase beta-prime chain from S. pneumoniae; and wherein the polypeptide of (a), (b) or (c) is at least about 90% pure in a sample of the composition;
W) a composition comprising an isolated, recombinant polypeptide, wherein the polypeptide comprises: (a) an amino acid sequence set forth in SEQ ID NO: 203 or SEQ ID NO: 205; (b) an amino acid sequence having at least about 95% identity with the amino acid sequence set forth in SEQ ID NO: 203 or SEQ ID NO: 205; or (c) an amino acid sequence encoded by a polynucleotide that hybridizes under stringent conditions to the complementary strand of a polynucleotide having SEQ ID NO: 202 or SEQ ID NO: 204 and has at least one biological activity of RNA polymerase sigma-70 factor from S. pneumoniae; and wherein the polypeptide of (a), (b) or (c) is at least about 90% pure in a sample of the composition;
X) a composition comprising an isolated, recombinant polypeptide, wherein the polypeptide comprises: (a) an amino acid sequence set forth in SEQ ID NO: 212 or SEQ ID NO: 214; (b) an amino acid sequence having at least about 95% identity with the amino acid sequence set forth in SEQ ID NO: 212 or SEQ ID NO: 214; or (c) an amino acid sequence encoded by a polynucleotide that hybridizes under stringent conditions to the complementary strand of a polynucleotide having SEQ ID NO: 211 or SEQ ID NO: 213 and has at least one biological activity of transketolase 1 isozyme from S. pneumoniae; and wherein the polypeptide of (a), (b) or (c) is at least about 90% pure in a sample of the composition;
Y) a composition comprising an isolated, recombinant polypeptide, wherein the polypeptide comprises: (a) an amino acid sequence set forth in SEQ ID NO: 221 or SEQ ID NO: 223; (b) an amino acid sequence having at least about 95% identity with the amino acid sequence set forth in SEQ ID NO: 221 or SEQ ID NO: 223; or (c) an amino acid sequence encoded by a polynucleotide that hybridizes under stringent conditions to the complementary strand of a polynucleotide having SEQ ID NO: 220 or SEQ ID NO: 222 and has at least one biological activity of tryptophan tRNA synthetase from P. aeruginosa; and wherein the polypeptide of (a), (b) or (c) is at least about 90% pure in a sample of the composition;
Z) a composition comprising an isolated, recombinant polypeptide, wherein the polypeptide comprises: (a) an amino acid sequence set forth in SEQ ID NO: 230 or SEQ ID NO: 232; (b) an amino acid sequence having at least about 95% identity with the amino acid sequence set forth in SEQ ID NO: 230 or SEQ ID NO: 232; or (c) an amino acid sequence encoded by a polynucleotide that hybridizes under stringent conditions to the complementary strand of a polynucleotide having SEQ ID NO: 229 or SEQ ID NO: 231 and has at least one biological activity of holo-(acyl-carrier protein) synthase from E. faecalis; and wherein the polypeptide of (a), (b) or (c) is at least about 90% pure in a sample of the composition;
AA) a composition comprising an isolated, recombinant polypeptide, wherein the polypeptide comprises: (a) an amino acid sequence set forth in SEQ ID NO: 239 or SEQ ID NO: 241; (b) an amino acid sequence having at least about 95% identity with the amino acid sequence set forth in SEQ ID NO: 239 or SEQ ID NO: 241; or (c) an amino acid sequence encoded by a polynucleotide that hybridizes under stringent conditions to the complementary strand of a polynucleotide having SEQ ID NO: 238 or SEQ ID NO: 240 and has at least one biological activity of glutamate racemase from E. faecalis; and wherein the polypeptide of (a), (b) or (c) is at least about 90% pure in a sample of the composition;
BB) a composition comprising an isolated, recombinant polypeptide, wherein the polypeptide comprises: (a) an amino acid sequence set forth in SEQ ID NO: 248 or SEQ ID NO: 250; (b) an amino acid sequence having at least about 95% identity with the amino acid sequence set forth in SEQ ID NO: 248 or SEQ ID NO: 250; or (c) an amino acid sequence encoded by a polynucleotide that hybridizes under stringent conditions to the complementary strand of a polynucleotide having SEQ ID NO: 247 or SEQ ID NO: 249 and has at least one biological activity of glutamate racemase from S. pneumoniae; and wherein the polypeptide of (a), (b) or (c) is at least about 90% pure in a sample of the composition;
CC) a composition comprising an isolated, recombinant polypeptide, wherein the polypeptide comprises: (a) an amino acid sequence set forth in SEQ ID NO: 257 or SEQ ID NO: 259; (b) an amino acid sequence having at least about 95% identity with the amino acid sequence set forth in SEQ ID NO: 257 or SEQ ID NO: 259; or (c) an amino acid sequence encoded by a polynucleotide that hybridizes under stringent conditions to the complementary strand of a polynucleotide having SEQ ID NO: 256 or SEQ ID NO: 258 and has at least one biological activity of aspartate tRNA synthetaseC from S. pneumoniaeC; and wherein the polypeptide of (a), (b) or (c) is at least about 90% pure in a sample of the composition;
DD) a composition comprising an isolated, recombinant polypeptide, wherein the polypeptide comprises: (a) an amino acid sequence set forth in SEQ ID NO: 266 or SEQ ID NO: 268; (b) an amino acid sequence having at least about 95% identity with the amino acid sequence set forth in SEQ ID NO: 266 or SEQ ID NO: 268; or (c) an amino acid sequence encoded by a polynucleotide that hybridizes under stringent conditions to the complementary strand of a polynucleotide having SEQ ID NO: 265 or SEQ ID NO: 267 and has at least one biological activity of gamma-glutamyl phosphate reductase from E. faecalis; and wherein the polypeptide of (a), (b) or (c) is at least about 90% pure in a sample of the composition;
EE) a composition comprising an isolated, recombinant polypeptide, wherein the polypeptide comprises: (a) an amino acid sequence set forth in SEQ ID NO: 275 or SEQ ID NO: 277; (b) an amino acid sequence having at least about 95% identity with the amino acid sequence set forth in SEQ ID NO: 275 or SEQ ID NO: 277; or (c) an amino acid sequence encoded by a polynucleotide that hybridizes under stringent conditions to the complementary strand of a polynucleotide having SEQ ID NO: 274 or SEQ ID NO: 276 and has at least one biological activity of triosephosphate isomerase from E. faecalis; and wherein the polypeptide of (a), (b) or (c) is at least about 90% pure in a sample of the composition;
FF) a composition comprising an isolated, recombinant polypeptide, wherein the polypeptide comprises: (a) an amino acid sequence set forth in SEQ ID NO: 284 or SEQ ID NO: 286; (b) an amino acid sequence having at least about 95% identity with the amino acid sequence set forth in SEQ ID NO: 284 or SEQ ID NO: 286; or (c) an amino acid sequence encoded by a polynucleotide that hybridizes under stringent conditions to the complementary strand of a polynucleotide having SEQ ID NO: 283 or SEQ ID NO: 285 and has at least one biological activity of triosephosphate isomerase from S. pneumoniae; and wherein the polypeptide of (a), (b) or (c) is at least about 90% pure in a sample of the composition;
GG) a composition comprising an isolated, recombinant polypeptide, wherein the polypeptide comprises: (a) an amino acid sequence set forth in SEQ ID NO: 293 or SEQ ID NO: 295; (b) an amino acid sequence having at least about 95% identity with the amino acid sequence set forth in SEQ ID NO: 293 or SEQ ID NO: 295; or (c) an amino acid sequence encoded by a polynucleotide that hybridizes under stringent conditions to the complementary strand of a polynucleotide having SEQ ID NO: 292 or SEQ ID NO: 294 and has at least one biological activity of branched-chain alpha-keto acid dehydrogenase from P. aeruginosa; and wherein the polypeptide of (a), (b) or (c) is at least about 90% pure in a sample of the composition;
HH) a composition comprising an isolated, recombinant polypeptide, wherein the polypeptide comprises: (a) an amino acid sequence set forth in SEQ ID NO: 302 or SEQ ID NO: 304; (b) an amino acid sequence having at least about 95% identity with the amino acid sequence set forth in SEQ ID NO: 302 or SEQ ID NO: 304; or (c) an amino acid sequence encoded by a polynucleotide that hybridizes under stringent conditions to the complementary strand of a polynucleotide having SEQ ID NO: 301 or SEQ ID NO: 303 and has at least one biological activity of tetrahydrodipicolinate (THDP) N-succinyltransferase from E. faecalis; and wherein the polypeptide of (a), (b) or (c) is at least about 90% pure in a sample of the composition;
II) a composition comprising an isolated, recombinant polypeptide, wherein the polypeptide comprises: (a) an amino acid sequence set forth in SEQ ID NO: 311 or SEQ ID NO: 313; (b) an amino acid sequence having at least about 95% identity with the amino acid sequence set forth in SEQ ID NO: 311 or SEQ ID NO: 313; or (c) an amino acid sequence encoded by a polynucleotide that hybridizes under stringent conditions to the complementary strand of a polynucleotide having SEQ ID NO: 310 or SEQ ID NO: 312 and has at least one biological activity of elongation factor P (EF-P) from P. aeruginosa; and wherein the polypeptide of (a), (b) or (c) is at least about 90% pure in a sample of the composition;
JJ) a composition comprising an isolated, recombinant polypeptide, wherein the polypeptide comprises: (a) an amino acid sequence set forth in SEQ ID NO: 320 or SEQ ID NO: 322; (b) an amino acid sequence having at least about 95% identity with the amino acid sequence set forth in SEQ ID NO: 320 or SEQ ID NO: 322; or (c) an amino acid sequence encoded by a polynucleotide that hybridizes under stringent conditions to the complementary strand of a polynucleotide having SEQ ID NO: 319 or SEQ ID NO: 321 and has at least one biological activity of fructose-bisphosphate aldolase from E. faecalis; and wherein the polypeptide of (a), (b) or (c) is at least about 90% pure in a sample of the composition;
KK) a composition comprising an isolated, recombinant polypeptide, wherein the polypeptide comprises: (a) an amino acid sequence set forth in SEQ ID NO: 329 or SEQ ID NO: 331; (b) an amino acid sequence having at least about 95% identity with the amino acid sequence set forth in SEQ ID NO: 329 or SEQ ID NO: 331; or (c) an amino acid sequence encoded by a polynucleotide that hybridizes under stringent conditions to the complementary strand of a polynucleotide having SEQ ID NO: 328 or SEQ ID NO: 330 and has at least one biological activity of isopentenyl diphosphate isomerase from E. faecalis; and wherein the polypeptide of (a), (b) or (c) is at least about 90% pure in a sample of the composition;
LL) a composition comprising an isolated, recombinant polypeptide, wherein the polypeptide comprises: (a) an amino acid sequence set forth in SEQ ID NO: 338 or SEQ ID NO: 340; (b) an amino acid sequence having at least about 95% identity with the amino acid sequence set forth in SEQ ID NO: 338 or SEQ ID NO: 340; or (c) an amino acid sequence encoded by a polynucleotide that hybridizes under stringent conditions to the complementary strand of a polynucleotide having SEQ ID NO: 337 or SEQ ID NO: 339 and has at least one biological activity of glutamate dehydrogenase from E. faecalis; and wherein the polypeptide of (a), (b) or (c) is at least about 90% pure in a sample of the composition;
MM) a composition comprising an isolated, recombinant polypeptide, wherein the polypeptide comprises: (a) an amino acid sequence set forth in SEQ ID NO: 347 or SEQ ID NO: 349; (b) an amino acid sequence having at least about 95% identity with the amino acid sequence set forth in SEQ ID NO: 347 or SEQ ID NO: 349; or (c) an amino acid sequence encoded by a polynucleotide that hybridizes under stringent conditions to the complementary strand of a polynucleotide having SEQ ID NO: 346 or SEQ ID NO: 348 and has at least one biological activity of GroEL protein from S. pneumoniae; and wherein the polypeptide of (a), (b) or (c) is at least about 90% pure in a sample of the composition;
NN) a composition comprising an isolated, recombinant polypeptide, wherein the polypeptide comprises: (a) an amino acid sequence set forth in SEQ ID NO: 356 or SEQ ID NO: 358; (b) an amino acid sequence having at least about 95% identity with the amino acid sequence set forth in SEQ ID NO: 356 or SEQ ID NO: 358; or (c) an amino acid sequence encoded by a polynucleotide that hybridizes under stringent conditions to the complementary strand of a polynucleotide having SEQ ID NO: 355 or SEQ ID NO: 357 and has at least one biological activity of ATP-binding component of molybdate transport system from S. aureus; and wherein the polypeptide of (a), (b) or (c) is at least about 90% pure in a sample of the composition;
OO) a composition comprising an isolated, recombinant polypeptide, wherein the polypeptide comprises: (a) an amino acid sequence set forth in SEQ ID NO: 365 or SEQ ID NO: 367; (b) an amino acid sequence having at least about 95% identity with the amino acid sequence set forth in SEQ ID NO: 365 or SEQ ID NO: 367; or (c) an amino acid sequence encoded by a polynucleotide that hybridizes under stringent conditions to the complementary strand of a polynucleotide having SEQ ID NO: 364 or SEQ ID NO: 366 and has at least one biological activity of DNA topoisomerase IV subunit A from P. aeruginosa; and wherein the polypeptide of (a), (b) or (c) is at least about 90% pure in a sample of the composition;
PP) a composition comprising an isolated, recombinant polypeptide, wherein the polypeptide comprises: (a) an amino acid sequence set forth in SEQ ID NO: 374 or SEQ ID NO: 376; (b) an amino acid sequence having at least about 95% identity with the amino acid sequence set forth in SEQ ID NO: 374 or SEQ ID NO: 376; or (c) an amino acid sequence encoded by a polynucleotide that hybridizes under stringent conditions to the complementary strand of a polynucleotide having SEQ ID NO: 373 or SEQ ID NO: 375 and has at least one biological activity of GTP cyclohydrolase II from S. pneumoniae; and wherein the polypeptide of (a), (b) or (c) is at least about 90% pure in a sample of the composition;
QQ) a composition comprising an isolated, recombinant polypeptide, wherein the polypeptide comprises: (a) an amino acid sequence set forth in SEQ ID NO: 383 or SEQ ID NO: 385; (b) an amino acid sequence having at least about 95% identity with the amino acid sequence set forth in SEQ ID NO: 383 or SEQ ID NO: 385; or (c) an amino acid sequence encoded by a polynucleotide that hybridizes under stringent conditions to the complementary strand of a polynucleotide having SEQ ID NO: 382 or SEQ ID NO: 384 and has at least one biological activity of putative aspartate-semialdehyde dehydrogenase from E. faecalis; and wherein the polypeptide of (a), (b) or (c) is at least about 90% pure in a sample of the composition.The composition of claim 1, wherein the polypeptide is purified to essential homogeneity;
RR) a composition comprising an isolated, recombinant polypeptide, wherein the polypeptide comprises: (a) an amino acid sequence set forth in SEQ ID NO: 392 or SEQ ID NO: 394; (b) an amino acid sequence having at least about 95% identity with the amino acid sequence set forth in SEQ ID NO: 392 or SEQ ID NO: 394; or (c) an amino acid sequence encoded by a polynucleotide that hybridizes under stringent conditions to the complementary strand of a polynucleotide having SEQ ID NO: 391 or SEQ ID NO: 393 and has at least one biological activity of elongation factor P (EF-P) from H. pylori; and wherein the polypeptide of (a), (b) or (c) is at least about 90% pure in a sample of the composition;
SS) a composition comprising an isolated, recombinant polypeptide, wherein the polypeptide comprises: (a) an amino acid sequence set forth in SEQ ID NO: 401 or SEQ ID NO: 403; (b) an amino acid sequence having at least about 95% identity with the amino acid sequence set forth in SEQ ID NO: 401 or SEQ ID NO: 403; or (c) an amino acid sequence encoded by a polynucleotide that hybridizes under stringent conditions to the complementary strand of a polynucleotide having SEQ ID NO: 400 or SEQ ID NO: 402 and has at least one biological activity of GroES protein from S. aureus; and wherein the polypeptide of (a), (b) or (c) is at least about 90% pure in a sample of the composition;
TT) a composition comprising an isolated, recombinant polypeptide, wherein the polypeptide comprises: (a) an amino acid sequence set forth in SEQ ID NO: 410 or SEQ ID NO: 412; (b) an amino acid sequence having at least about 95% identity with the amino acid sequence set forth in SEQ ID NO: 410 or SEQ ID NO: 412; or (c) an amino acid sequence encoded by a polynucleotide that hybridizes under stringent conditions to the complementary strand of a polynucleotide having SEQ ID NO: 409 or SEQ ID NO: 411 and has at least one biological activity of GroES protein from P. aeruginosa; and wherein the polypeptide of (a), (b) or (c) is at least about 90% pure in a sample of the composition;
UU) a composition comprising an isolated, recombinant polypeptide comprising: (a) an amino acid sequence set forth in SEQ ID NO: 419 or SEQ ID NO: 421; (b) an amino acid sequence having at least about 90% identity with the amino acid sequence set forth in SEQ ID NO: 419 or SEQ ID NO: 421; or (c) an amino acid sequence encoded by a polynucleotide that hybridizes under stringent conditions to the complementary strand of a polynucleotide having SEQ ID NO: 418 or SEQ ID NO: 420 and has at least one biological activity of GroES protein from H. pylori; and wherein the polypeptide of (a), (b) or (c) is at least about 90% pure in a sample of the composition;
VV) a composition comprising an isolated, recombinant polypeptide, wherein the polypeptide comprises: (a) an amino acid sequence set forth in SEQ ID NO: 428 or SEQ ID NO: 430; (b) an amino acid sequence having at least about 95% identity with the amino acid sequence set forth in SEQ ID NO: 428 or SEQ ID NO: 430; or (c) an amino acid sequence encoded by a polynucleotide that hybridizes under stringent conditions to the complementary strand of a polynucleotide having SEQ ID NO: 427 or SEQ ID NO: 429 and has at least one biological activity of transcription termination factor NusG from E. coli; and wherein the polypeptide of (a), (b) or (c) is at least about 90% pure in a sample of the composition;
WW) a composition comprising an isolated, recombinant polypeptide, wherein the polypeptide comprises: (a) an amino acid sequence set forth in SEQ ID NO: 437 or SEQ ID NO: 439; (b) an amino acid sequence having at least about 95% identity with the amino acid sequence set forth in SEQ ID NO: 437 or SEQ ID NO: 439; or (c) an amino acid sequence encoded by a polynucleotide that hybridizes under stringent conditions to the complementary strand of a polynucleotide having SEQ ID NO: 436 or SEQ ID NO: 438 and has at least one biological activity of GrpE protein from S. aureus; and wherein the polypeptide of (a), (b) or (c) is at least about 90% pure in a sample of the composition;
XX) a composition comprising an isolated, recombinant polypeptide, wherein the polypeptide comprises: (a) an amino acid sequence set forth in SEQ ID NO: 446 or SEQ ID NO: 448; (b) an amino acid sequence having at least about 95% identity with the amino acid sequence set forth in SEQ ID NO: 446 or SEQ ID NO: 448; or (c) an amino acid sequence encoded by a polynucleotide that hybridizes under stringent conditions to the complementary strand of a polynucleotide having SEQ ID NO: 445 or SEQ ID NO: 447 and has at least one biological activity of transcription termination factor NusG from H. pylori; and wherein the polypeptide of (a), (b) or (c) is at least about 90% pure in a sample of the composition;
YY) a composition comprising an isolated, recombinant polypeptide, wherein the polypeptide comprises: (a) an amino acid sequence set forth in SEQ ID NO: 455 or SEQ ID NO: 457; (b) an amino acid sequence having at least about 95% identity with the amino acid sequence set forth in SEQ ID NO: 455 or SEQ ID NO: 457; or (c) an amino acid sequence encoded by a polynucleotide that hybridizes under stringent conditions to the complementary strand of a polynucleotide having SEQ ID NO: 454 or SEQ ID NO: 456 and has at least one biological activity of transcription termination factor NusG from S. pneumoniae; and wherein the polypeptide of (a), (b) or (c) is at least about 90% pure in a sample of the composition;
ZZ) a composition comprising an isolated, recombinant polypeptide, wherein the polypeptide comprises: (a) an amino acid sequence set forth in SEQ ID NO: 464 or SEQ ID NO: 466; (b) an amino acid sequence having at least about 95% identity with the amino acid sequence set forth in SEQ ID NO: 464 or SEQ ID NO: 466; or (c) an amino acid sequence encoded by a polynucleotide that hybridizes under stringent conditions to the complementary strand of a polynucleotide having SEQ ID NO: 463 or SEQ ID NO: 465 and has at least one biological activity of DNA-directed RNA polymerase, alpha subunit from H. pylori; and wherein the polypeptide of (a), (b) or (c) is at least about 90% pure in a sample of the composition;
AAA) a composition comprising an isolated, recombinant polypeptide, wherein the polypeptide comprises: (a) an amino acid sequence set forth in SEQ ID NO: 473 or SEQ ID NO: 475; (b) an amino acid sequence having at least about 95% identity with the amino acid sequence set forth in SEQ ID NO: 473 or SEQ ID NO: 475; or (c) an amino acid sequence encoded by a polynucleotide that hybridizes under stringent conditions to the complementary strand of a polynucleotide having SEQ ID NO: 472 or SEQ ID NO: 474 and has at least one biological activity of DNA-directed RNA polymerase, alpha subunit from S. aureus; and wherein the polypeptide of (a), (b) or (c) is at least about 90% pure in a sample of the composition;
BBB) a composition comprising an isolated, recombinant polypeptide, wherein the polypeptide comprises: (a) an amino acid sequence set forth in SEQ ID NO: 482 or SEQ ID NO: 484; (b) an amino acid sequence having at least about 95% identity with the amino acid sequence set forth in SEQ ID NO: 482 or SEQ ID NO: 484; or (c) an amino acid sequence encoded by a polynucleotide that hybridizes under stringent conditions to the complementary strand of a polynucleotide having SEQ ID NO: 481 or SEQ ID NO: 483 and has at least one biological activity of prolyl-tRNA synthetase from H. pylori; and wherein the polypeptide of (a), (b) or (c) is at least about 90% pure in a sample of the composition;
CCC) a composition comprising an isolated, recombinant polypeptide, wherein the polypeptide comprises: (a) an amino acid sequence set forth in SEQ ID NO: 491 or SEQ ID NO: 493; (b) an amino acid sequence having at least about 95% identity with the amino acid sequence set forth in SEQ ID NO: 491 or SEQ ID NO: 493; or (c) an amino acid sequence encoded by a polynucleotide that hybridizes under stringent conditions to the complementary strand of a polynucleotide having SEQ ID NO: 490 or SEQ ID NO: 492 and has at least one biological activity of seryl-tRNA synthetase from S. pneumoniae; and wherein the polypeptide of (a), (b) or (c) is at least about 90% pure in a sample of the composition;
DDD) a composition comprising an isolated, recombinant polypeptide, wherein the polypeptide comprises: (a) an amino acid sequence set forth in SEQ ID NO: 500 or SEQ ID NO: 502; (b) an amino acid sequence having at least about 95% identity with the amino acid sequence set forth in SEQ ID NO: 500 or SEQ ID NO: 502; or (c) an amino acid sequence encoded by a polynucleotide that hybridizes under stringent conditions to the complementary strand of a polynucleotide having SEQ ID NO: 499 or SEQ ID NO: 501 and has at least one biological activity of L-cysteine desulfurase from P. aeruginosa; and wherein the polypeptide of (a), (b) or (c) is at least about 90% pure in a sample of the composition;
EEE) a composition comprising an isolated, recombinant polypeptide, wherein the polypeptide comprises: (a) an amino acid sequence set forth in SEQ ID NO: 509 or SEQ ID NO: 511; (b) an amino acid sequence having at least about 95% identity with the amino acid sequence set forth in SEQ ID NO: 509 or SEQ ID NO: 511; or (c) an amino acid sequence encoded by a polynucleotide that hybridizes under stringent conditions to the complementary strand of a polynucleotide having SEQ ID NO: 508 or SEQ ID NO: 510 and has at least one biological activity of RhlR and LasR homologue from E. coli; and wherein the polypeptide of (a), (b) or (c) is at least about 90% pure in a sample of the composition;
FFF) a composition comprising an isolated, recombinant polypeptide, wherein the polypeptide comprises: (a) an amino acid sequence set forth in SEQ ID NO: 518 or SEQ ID NO: 520; (b) an amino acid sequence having at least about 95% identity with the amino acid sequence set forth in SEQ ID NO: 518 or SEQ ID NO: 520; or (c) an amino acid sequence encoded by a polynucleotide that hybridizes under stringent conditions to the complementary strand of a polynucleotide having SEQ ID NO: 517 or SEQ ID NO: 519 and has at least one biological activity of autoinducer synthesis protein RhlI from P. aeruginosa; and wherein the polypeptide of (a), (b) or (c) is at least about 90% pure in a sample of the composition;
GGG) a composition comprising an isolated, recombinant polypeptide comprising: (a) an amino acid sequence set forth in SEQ ID NO: 527 or SEQ ID NO: 529; (b) an amino acid sequence having at least about 90% identity with the amino acid sequence set forth in SEQ ID NO: 527 or SEQ ID NO: 529; or (c) an amino acid sequence encoded by a polynucleotide that hybridizes under stringent conditions to the complementary strand of a polynucleotide having SEQ ID NO: 526 or SEQ ID NO: 528 and has at least one biological activity of autoinducer synthesis protein LasI from P. aeruginosa; and wherein the polypeptide of (a), (b) or (c) is at least about 90% pure in a sample of the composition;
HHH) a composition comprising an isolated, recombinant polypeptide, wherein the polypeptide comprises: (a) an amino acid sequence set forth in SEQ ID NO: 536 or SEQ ID NO: 538; (b) an amino acid sequence having at least about 95% identity with the amino acid sequence set forth in SEQ ID NO: 536 or SEQ ID NO: 538; or (c) an amino acid sequence encoded by a polynucleotide that hybridizes under stringent conditions to the complementary strand of a polynucleotide having SEQ ID NO: 535 or SEQ ID NO: 537 and has at least one biological activity of adenylate kinase from S. aureus; and wherein the polypeptide of (a), (b) or (c) is at least about 90% pure in a sample of the composition;
III) a composition comprising an isolated, recombinant polypeptide, wherein the polypeptide comprises: (a) an amino acid sequence set forth in SEQ ID NO: 545 or SEQ ID NO: 547; (b) an amino acid sequence having at least about 95% identity with the amino acid sequence set forth in SEQ ID NO: 545 or SEQ ID NO: 547; or (c) an amino acid sequence encoded by a polynucleotide that hybridizes under stringent conditions to the complementary strand of a polynucleotide having SEQ ID NO: 544 or SEQ ID NO: 546 and has at least one biological activity of UDP-N-acetylglucosamine pyrophosphorylase (glmU) from H. pylori; and wherein the polypeptide of (a), (b) or (c) is at least about 90% pure in a sample of the composition;
JJJ) a composition comprising an isolated, recombinant polypeptide comprising: (a) an amino acid sequence set forth in SEQ ID NO: 554 or SEQ ID NO: 556; (b) an amino acid sequence having at least about 90% identity with the amino acid sequence set forth in SEQ ID NO: 554 or SEQ ID NO: 556; or (c) an amino acid sequence encoded by a polynucleotide that hybridizes under stringent conditions to the complementary strand of a polynucleotide having SEQ ID NO: 553 or SEQ ID NO: 555 and has at least one biological activity of geranyltranstransferase (farnesyldiphosphate synthase) from E. coli; and wherein the polypeptide of (a), (b) or (c) is at least about 90% pure in a sample of the composition;
KKK) a composition comprising an isolated, recombinant polypeptide, wherein the polypeptide comprises: (a) an amino acid sequence set forth in SEQ ID NO: 572 or SEQ ID NO: 574; (b) an amino acid sequence having at least about 95% identity with the amino acid sequence set forth in SEQ ID NO: 572 or SEQ ID NO: 574; or (c) an amino acid sequence encoded by a polynucleotide that hybridizes under stringent conditions to the complementary strand of a polynucleotide having SEQ ID NO: 571 or SEQ ID NO: 573 and has at least one biological activity of ribonucleoside diphosphate reductase, beta subunit from H. pylori; and wherein the polypeptide of (a), (b) or (c) is at least about 90% pure in a sample of the composition.
